United States Patent Application Publication US 2007/0015271 A1 - sequence listing, part 2

SEQ ID NO: 1332 - DNA, 3515 bp, Homo sapiens
  misc_feature (1)..(1): n equals a,t,g, or c
  misc_feature (11)..(11): n equals a,t,g, or c
  misc_feature (18)..(18): n equals a,t,g, or c
  misc_feature (3490)..(3490): n equals a,t,g, or c
  misc_feature (3505)..(3505): n equals a,t,g, or c
naggccacagnaaactcntttgstatttmsgtgacactatagaaggtacgcctgcaggtaccggtccggaattcccgggtcgacccacgcgtccgcaggtacagccaaccatgtcccagttcgaaatggacacgtatgctaagagccacgaccttatgtcaggtttctggaatgcctgctatgacatgcttatgagcagtgggcagcggcgccagtgggagcgcgcccagagtcgtcgggccttccaggagctggtgctggaacctgcgcagaggcgggcgcgcctggaggggctacgctacacggcagtgctgaagcagcaggcaacgcagcactccatggccctgctgcactggggggcgctgtggcgccagctcgccagcccatgtggggcctgggcgctgagggacactcccatcccccgctggaaactgtccagcgccgagacatattcacgcatgcgtctgaagctggtgcccaaccatcacttcgaccctcacctggaagccagcgctctccgagacaatctgggtgaggttcccctgacacccaccgaggaggcctcactgcctctggcagtgaccaaagaggccaaagtgagcaccccacccgagttgctgcaggaggaccagctcggcgaggacgagctggctgagctggagaccccgatggaggcagcagaactggatgagcagcgtgagaagctggtgctgtcggccgagtgccagctggtgacggtagtggccgtggtcccagggctgctggaggtcaccacacagaatgtatacttctacgatggcagcactgagcgcgtggaaaccgaggagggcatcggctatgatttccggcgcccactggcccagctgcgtgaggtccacctgcggcgtttcaacctgcgccgttcagcacttgagctcttctttatcgatcaggccaactacttcctcaacttcccatgcaaggtgggcacgaccccagtctcatctcctagccagactccgagaccccagcctggccccatcccaccccatacccaggtacggaaccaggtgtactcgtggctcctgcgcctacggcccccctctcaaggctacctaagcagccgctccccccaggagatgctgcgtgcctcaggccttacccagaaatgggtacagcgtgagatatccaacttcgagtacttgatgcaactcaacaccattgcggggcggacctacaatgacctgtctcagtaccctgtgttcccctgggtcctgcaggactacgtgtccccaaccctggacctcagcaacccagccgtcttccgggacctgtctaagcccatcggtgtggtgaaccccaagcatgcccagctcgtgagggagaagtatgaaagctttgaggacccagcagggaccattgacaagttccactatggcacccactactccaatgcagcaggcgtgatgcactacctcatccgcgtggagcccttcacctccctgcacgtccagctgcaaagtggccgctttgactgctccgaccggcagttccactcggtggcggcagcctggcaggcacgcctggagagccctgccgatgtgaaggagctcatcccggaattcttctactttcctgacttcctggagaaccagaacggttttgacctgggctgtctccagctgaccaacgagaaggtaggcgatgtggtgctacccccgtgggccagctctcctgaggacttcatccagcagcaccgccaggctctggagtcggagtatgtgtctgcacacctacacgagtggatcgacctcatctttggctacaagcagcgggggccagccgccgaggaggccctcaatgtcttctattactgcacctatgagggggctgtagacctggaccatgtgacagatgagcgggaacggaaggctctggagggcattatcagcaactttgggcagactccctgtcagctgctgaaggagccacatccaactcggctctcagctgaggaagcagcccatcgccttgcacgcctggacactaactcacctagcatcttccagcacctggacgaactcaaggcattcttcgcagaggttgtcagtgatggtgtacccctggtgctagccctggtcccccaccggcagccccactccttcatcacccagggttccccagacctgttggtgactgtgagtgccagtgggctgctgggcacccacagctggttgccctatgaccgcaacataagcaactacttcagcttcagcaaagaccccaccatgggcagccacaagacgcagcgactgctgagtggcccgtgggtgccaggcagtggtgtgagtggacaagcactggcagtggccccggatggaaagctgctattcagcggtggccactgggatggcagcctgcgggtgactgcactaccccgtggcaagctgttgagccagctcagctgccaccttgatgtagtaacctgccttgcactggacacctgtggcatctacctcatctcaggctcccgggacaccacgtgcatggtgtggcggctcctgcatcagggtggtctgtcagtaggcctggcaccaaagcctgtgcaggtcctgtatgggcatggggctgcagtgagctgtgtggccatcagcactgaacttgacatggctgtgtctggatctgaggatggaactgtgatcatacacactgtacgccgcggacagtttgtagcggcactacggcctctgggtgccacattccctggacctattttccacctggcattggggtccgaaggccagattgtggtacagagctcagcgtgggaacgtcctggggcccaggtcacctactccttgcacctgtattcagtcaatgggaagttgcgggcttcactgcccctggcagagcagcctacagccctgacggtgacagaggactttgtgttgctgggcaccgcccagtgcgccctgcacatcctccaactaaacacactgctcccggccgcgcctcccttgcccatgaaggtggccatccgcagcgtggccgtgaccaaggagcgcagccacgtgctggtgggcctggaggatggcaagctcatcgtggtggtcgcggggcagccctctgaggtgcgcagcagccagttcgcgcggaagctgtggcggtcctcgcggcgcatctcccaggtgtcctcgggagagacggaatacaaccctactgaggcgcgctgaacctggccagtccggctgctcgggccccgcccccggcaggcctggcccgggaggccccgcccagaagtcggcgggaacaccccggggtgggcagcccaggggggtgagcggggcccaccctgcccagctcagggattggcgggcgatgttaccccctcagggattggcgggcggaagtcccgcccctcgccggctgaggggccgccctgagggccagcactggcgtctgcggccgctctagaggatccctcgaggggcccaagcttacgcgtgcatgngacgtcatagctacnctccctatag

SEQ ID NO: 1333 - DNA, 242 bp, Homo sapiens
  misc_feature (220)..(220): n equals a,t,g, or c
  misc_feature (239)..(239): n equals a,t,g, or c
actggcgtctgcggccgcagcagcactttttgcacagtctggggcggggttccccggcttccaagtcgctgtttcgtcaaagcacgagggccgcctgtggccttaattcctaacggcggccccggttctcccttctcggcaataaaccaggcctagttttgtaaaaaaaaaaaaaaaaaaaaaaaaaaaaaaaaaaaaaaactcgagggggggcccgtancaatcgccctatagaagcnaaa

SEQ ID NO: 1334 - DNA, 777 bp, Homo sapiens
  misc_feature (19)..(19): n equals a,t,g, or c
  misc_feature (31)..(31): n equals a,t,g, or c
  misc_feature (40)..(40): n equals a,t,g, or c
  misc_feature (771)..(771): n equals a,t,g, or c
ttaaaggggaccaaaaagntggaagttcccnccgcggtgncggcccgctckyagaactagtggatcccccgggcttgcaggaattcggcacgaggggaagcagatcggtaccacatgcagtcctgataaaatgtaaggtgggaaggaaagaatgaaaatgaagtgggcagatgtaaagagaccggcaaagttcacgtgactgtggatctcaagtactaccggccaactgaagtggactttctgcagggcgactgcaccaaagcgaaacagaagctgaactggaagccccgggtcgctttcgatgagctggtgagggagatggtgcacgccgacgtggagctcatgaggacaaaccccaatgcctgagcagcgcctcggagcccggcccgccctccggctacaatccccgcagagtctccggtgcagacgcgctgcggggatggggagcggcgtgccaatctgcgggtcccctgcggcccctgctgccgctgcgctgtcccggccgcaagagcggggccgccccgccgaggtttgtagcagccgggatgtgaccctccagggtttgggtcgctttgcgtttgtcgaagcctcctctgaatggctttgtgaaatcaagatgttttaatcacattcactttacttgaaattatgttgttacacaacaaattgtggggccttcaaattgtttttctcttttcatattaaaaatggtctttctgtgaactagcaaaaaaaaaaaaaaaaactcgagggggggcccgcccccattgncccctt

SEQ ID NO: 1335 - DNA, 609 bp, Homo sapiens
  misc_feature (168)..(168): n equals a,t,g, or c
  misc_feature (222)..(222): n equals a,t,g, or c
  misc_feature (225)..(225): n equals a,t,g, or c
  misc_feature (332)..(332): n equals a,t,g, or c
ttggggggttggttttttttctgcaatgttttccagccaattcccaaggttggaatgttctggggcataaaatatccctttcagtggccattccctggatgcaaatgtccaacgttccatgctttggtcagtggttaattttgcccagctggcatggcaatggggacntggggcaggacttcctgggccagtgcttgtgcccagtggtaggcgacatcaccntcntcgttttaggccacagcatgattcaccaaccccagtgcccactcagtcgtcggcctgtgaagatgagctccttcaccagggccacccccaggcagtgtggcagcctntgagtacctcctgtccctgggaggagccctcgagtggtctctcaatcagttccatgactttcgaggaagctgccacttggaggtcgcaggccagggcaagctccaggcctccacccarggcgamcccatccatagccacaatggctatggaygctaactatatatgcatggtaaccttctcatcccagccctttatataccttaaccttcttttgtatcttctctatcccttgttgtcctctgcttcattccaagaaattattaaaacctttcttct

SEQ ID NO: 1336 - DNA, 774 bp, Homo sapiens
gaattcggcacgaggaaaaaaatccaatctgatatcatagatttggaatcaaggctggtgagtggcataggttgaggaggctcttttggaaaagttattgacagaataaataaatgaatgaatgaagaatactccagcctggatttaagagtaaaccatatcacttgcttccttctcaagatggccttgtgtggattcttatgttattgaagctttggagcattttgctaggaaattctttccttctattgcaacatcgtggcgatcaggctgcactgtcagttgagcactggggactgagatgtttgtgaatgctgtggtcagtcaggtctgagttcaatgaaaagtcattgcctgagggttgcataacttgattgctacaggtagagaatggcctttcaccaacaccaaagatttattggcttttgggtgggaaaagtcagcttttatatttcaagagagtaaatcatctcttgttaattgtgaagcctttaaaggctatttaggatggtgaacttctgctagagcttcatgcagtaatatgtaaaatatgtagttgaccagaagtttacagttttgactaatagaagtattagtcaatgggtaatacttcaagtttgccaagtcccagcttataactggaccttcataagccagcctcatgttctaacagtcagaagcactctagacttgcaactttaaaccctagttagaaaaaaaattagcaaatactatattttagccaaaaaaaaaaaaaaaaaaaaaaaaactcga

SEQ ID NO: 1337 - DNA, 1675 bp, Homo sapiens
acccacgcgtccgtatacatatctattagtatagtatctcttgaatgcgattttttctagaatgtgttctgctgatttgttttagagccatgagtgcaatttatacacatacatctattgggaatgctcagaagttgtttactgatggaagtgccttcagaagagtccgggaaccacttcctaaggaaggaaagagctggccacagttagagcaagcctgcctggggccctgctctgtgttccagctgcaaactgcctgcatcatcccttcctgttactcttccttcacctgagacagtcgaggccacagcgtcagccagggccagagctgggatttgaacccaggcactcgggctccagagccacactgccccagtgtggggcttagtggcggctcctggccctgactgaggggctgactgaagcctggtgagagcgtgctgggtcagcctctccctggcgggaatcctctccgtccagtcttctaacctagcagcctcacgtccacagagctgccttgtgaaactcagcagagccctggcttcctgcagagccgtgttctcccagcctgcttcatggctccctggttgagccaagcttgcggatccgtggggtgaaggtacccgcaccgcctgggccttagtggtatgtacgggcctgcatcgtgagcagcgggcgggggcccaggcaggtgaggcagctggccacaagggcagggcccggcccccctcccaaggctgtgtctgatattcttgagcctgttcgagtttccttttccaagcctcctgttctcccacccccacccctgccatgctgcagtgactaaatctgtggttctcatccttggagaacacctgagtagctgctacaagctggccacagcccagcgactctgatgtggttgggctgggtgtggccagcagccagggcatcgggacttttcgaagctcccaggtgactcaccggcagctggggatgagaactgtcaggagggaaggtcagaagtcccaggatgcacttgaaaagcctctagctccaccagtgaccagctcctggctggactcctggtctggactcagcatcagggaggctctggcctctcgccctcagggctgggggcttcttcacatggtcatcaaagacttggccagttccgcctctcccrcggccgtccttgtctcacccagcatcacgacgcatcagttcaccaacaaacacgattcagtgctgctagtgctgggtcctgttctgggggctggtgatgaggccaagagggaaagagggagctctgtgttccatcgagggggcgacaagcctggaccagatgaaagtgactcatgttgttaattagcggcttagggccaaaggtggcccctggaccagtggcctcagcatcacctgggaaaaggttagaaatgaacattcccaggccccacctcagcctcctgaatcagagcatccctttggcaaaccatactgagaaacaaccacgtgcatcaccaagcgctgtgaagaaggcaagctttgagaccttgaaggaatcatcaaactctgggcctcggtgtgctcacccagggcgagacaaagacgccatgctcctccaagtggcctccaagattaaatgagcaatgacttttaaaaaaaaaaaaaaaaaaaataaaaaaaaaaaaaaaaa

SEQ ID NO: 1338 - DNA, 4130 bp, Homo sapiens
gcttcccataagctatttacgtgacactatagaaggtacgcctgcaggtaccggtccggaattcgcggccgcgtcgacgccagccgtgggattaggcttcgccggctacgattgcggcccccatcttctgacttttcctcgtgtgacccatcttttcaaattcccttacctgaggaaggagcccgattacaaggatatttacctgctcctaccctgatctagggacgaggatgggaagaccgcctgtggccatgagccctccccggtgctcctggggctaaggctggggctgcagccatggggctgggtcagccccaggcctggttgctgggtctgcccacagctgtggtctatggctccctggctctcttcaccaccatcctgcacaatgtcttcctgctctactatgtggacacctttgtctcagtgtacaagatcaacaaaatggccttctgggtcggagagacagtgtttctcctctggaacagcctcaatgaccctctcttcggttggctcagtgaccggcagttcctcagctcccagccccgcctgtgtggagaggagctgcttgtgggcagtgaggaggcggacagcatcaccttgggccggtatctccggcagctggcacgccatcggaacttcctgtggttcgtgagcatggacctggtgcaggtcttccactgccacttcaacagcaacttcttccctctcttcctggagcatctgttgtccgaccatatctccctttccacgggctccatcctgttgggcctctcctatgtcgctccccatctcaacaacctctacttcctgtccctgtgccggcgctggggcgtctacgcggtggtgcgggggctcttcctgctcaagctgggacttagcctgctcatgttgttggccggcccggaccacctcagcctgctgtgcctcttcattgccagcaaccgcgtcttcactgagggcacctgtaagctgctgaccttggtggtcactgacctggtagacgaggacctggtgctgaaccaccgcaagcaggcagcctcggcactcctctttggcatggttgccttggtgaccaagccaggccagacctttgccccgctgctgggcacctggctgctctgtttctacacaggctgggacttgggctatgctctggacaaggctggctggtgcaatgatgccctctagaggatggatcaggcccagtcaccacctcagattcagtgcctgctgctcttcctctttccacttggccctggtgacagacagatagaggcccagctgacgtgtctatcggaacgactttatttcagtacactgggccccaccaggcaatgtggtttgtgcgaggctgtgcgagggacaggcttgggctaagagaagggaggtgagttggytaagcgcactgcagtccgcggggcgctacgttgctttcacacatacctgctgctgtggcccacacctggcaggggcctttggtcataggacggcgtgggggagaatactgtgtgaagtctgggattggggtgggtcttggtgtcacaggtgagggtgccggtgaagacaggctggccccagctttgcaccatctaggctgaaggcctttggaccactcctaggagtcaggcctggctccattagctcctggcactctggtctggcccactccctccttaaccaagcaggtccaaggtcaagaatggcacaagatcagcccagagggggccttcccacctctacaacctagtcccctggtcagctacagtggcaaaaggcaacttggtaaattgcagctttctccagtcttaagggcactggctctccaacacccctcccttgcttaggggcctctgccaaagaaaaattttacctcctgtttcagaaaatctaaccagcaaccagcctgttgattccagggcagtgagcaagaggaaaagggagaaagagcctggtgggagtgtctttgagtgtagcttccaatctcaaatggtcctggaacctgtggacactgtcagctcaccatcagctgggagaggtggggccctggaggctaagcttaggtgctgtaaacattagtgtagcaaggcaggaggcagcaagctccctctctccagcccctaactgaacaaacacttcaataaataaaacggtttgaagatggcattgcaacaagaacagatggaaagcgaggtcctggaaccagcaggtgccttaaactctcccaaggcccccgaaaggggactgggctgggaacattaactctgcagccattcagagggaggactgctcctgccctcctycagtggccggtgtggtcctgttccctggtgaacatgagggcctcctgctctctcctgactccagtctctgtaatagctcttggggtgcttttccagcctcccaaaccaaaatggcaacaaaaccagacagaactcaaccccagtcccagtcctcagtgtgcagtcaggaggcatcgatagtggaggcagcagctgcctggggcctcagggcaccctgggggtgggggtgagggtggggccagcccagcctaggatggtcagcagcaaggtctcccgggggatggcttacctccctctgtctccctgtggtagtaaacggagtcccccacagccagccagaggccacctgaggagggagcacagcctctgccagcgctcttccctgtcaggagccagttagtggtcaaccccaggcctcaggccatcaccactgcrggtagttcatcgtcctttctgggcccagggtcccagggccacacggcactcgcatgtgcrcacacactcatatccacacacgcactcacacacaggcagttcctcgcaaacactccgactcaagaaagcgagttttaaagtggagttaacttcagagagaggtgaagatgatgtcccgacattagaaggtttttctgtggatggatcgggcaccgtcttcctcatattcctttttggagacccacatcttcttaaaggtgtccagggaggcaaggatggagcccccaatccacgtggaatacagtctctcctgaggtgcagatatcctgatcttcacatcttttggagctagtttcttcacttcactcaggagcctgtcaccaaaacctttgaacagggtagagcctcctgagaggacaatgttagagaaaagcgtgcgccgcaggtccatgtctgacttctgaatggcgaacaccaggacctcgtggatgccttcactctcctctccaatcaaatctggcctgaagagcaactcaggggcccggaatcgggaaggaccaatctcaatggtgctgccatcaggcaggtagtactgagctttctctgtctctagcgtctcatccttttgggggtttatggataggtaacaggctctttcttttatggccttgacaatctcaaactcagaggatgagtggaagtcgtagccctccttacgcaggtagaggcgcaggaagcgagagacgtcccggcccgcgatgtcgatgcgcatgatggagtggggcatggcaaagccctcatagatgggcacagcatgggtgactccatccccagaatccagcaccacccctgtggtcctgcctgtagcgtaaaggctgagtacagcttgcatggagatgaaaagagcgggcacattgaaggtctcgaagaaaacttcggcagctcgttcccggttttttcgtgggtttaaaggcgcctcagtcaggagcacaggatgctcctctgagaaagtctgcagctggtccttagaatagacatattgccaaatgcgttccatgtcgttccaatccttgacgatgccatgctccatgggatagcggattgaaagcagccctcggtgctcctcagctttggggccaatgaagatgtcgccttcaagggctcctgccatgacacgaacgtgcttgggtcggcccacatagtttggaaagcagtatttggggatctgatcaccagcaaaaccagctttaatcacaccggatccgttgtcgatcacgacaggctggttggcgatcacatcgtaggactccatggcagaggaatctctccttctggggaaggaactgcccagccgggtccgccgctagcgccactgacacgcatgcgcagtct

SEQ ID NO: 1339 - DNA, 392 bp, Homo sapiens
ggagtttttaaatgattcagaggtctggggttaagaacagagctggctctgatccctgttgctcactggttccttcttccccagggacgaggatgggaagaccgcctgtggccatgagccctccccggtgctcctggggctaaggctggggctgcagccatggggctgggtcagccccaggcctggttgctgggtctgcccacagctgtggtctatggctccctggctctcttcaccaccatcctgcacaatgtcttcctgctctactatgtggacacctttgtctcagtgtacaagatcaacaaaatggccttctgggtcggagagacagtgtttctcctctggaacagcctcaatgaccccctcttcggttggctcagtgaccggcagtt

SEQ ID NO: 1340 - DNA, 1617 bp, Homo sapiens
cttgaatgcgattttttctagaatgtgttctgctgatttgttttagagccatgagtgcaatttatacacatacatctattgggaatgctcagaagttgtttactgatggaagtgccttcagaagagtccgggaaccacttcctaaggaaggaaagagctggccacagttagagcaagcctgcctggggccctgctctgtgttccagctgcaaactgcctgcatcatcccttcctgttactcttccttcacctgagacagtcgaggccacagcgtcagccagggccagagctgggatttgaacccaggcactcgggctccagagccacactgccccagtgtggggcttagtggcggctcctggccctgactgaggggctgactgaagcctggtgagagcgtgctgggtcagcctctccctggcgggaatcctctccgtccagtcttctaacctagcagcctcacgtccacagagctgccttgtgaaactcagcagagccctggcttcctgcagagccgtgttctcccagcctgcttcatggctccctggttgagccaagcttgcggatccgtggggtgaaggtacccgcaccgcctgggccttagtggtatgtacgggcctgcatcgtgagcagcgggcgggggcccaggcaggtgaggcagctggccacaagggcagggcccggcccccctcccaaggctgtgtctgatattcttgagcctgttcgagtttccttttccaagcctcctgttctcccacccccacccctgccatgctgcagtgactaaatctgtggttctcatccttggagaacacctgagtagctgctacaagctggccacagcccagcgactctgatgtggttgggctgggtgtggccagcagccagggcatcgggacttttcgaagctcccaggtgactcaccggcagctggggatgagaactgtcaggagggaaggtcagaagtcccaggatgcacttgaaaagcctctagctccaccagtgaccagctcctggctggactcctggtctggactcagcatcagggaggctctggcctctcgccctcagggctgggggcttcttcacatggtcatcaaagacttggccagttccgcctctcccacggccgtccttgtctcacccagcatcacgacgcatcagttcaccaacaaacacgattcagtgctgctagtgctgggtcctgttctgggggctggtgatgaggccaagagggaaagagggagctctgtgttccatcgagggggcgacaagcctggaccagatgaaagtgactcatgttgttaattagcggcttagggccaaaggtggcccctggaccagtggcctcagcatcacctgggaaaaggttagaaatgaacattcccaggccccacctcagcctcctgaatcagagcatccctttggcaaaccatactgagaaacaaccacgtgcatcaccaagcgctgtgaagaaggcaagctttgagaccttgaaggaatcatcaaactctgggcctcggtgtgctcacccagggcgagacaaagacgccatgctcctccaagtggcctccaagattaaatgagcaatgacttttaaaaaaaaaaaaaaaaaaa

SEQ ID NO: 1341 - DNA, 916 bp, Homo sapiens
ggcacgaggagtttttaaatgattcagaggtctggggttaagaacagagctggctctgatccctgttgctcactggttccttcttccccagggacgaggatgggaagaccgcctgtggccatgagccctccccggtgctcctggggctaaggctggggctgcagccatggggctgggtcagccccaggcctggttgctgggtctgcccacagctgtggtctatggctccctggctctcttcaccaccatcctgcacaatgtcttcctgctctactatgtggacacctttgtctcagtgtacaagatcaacaaaatggccttctgggtcggagagacagtgtttctcctctggaacagcctcaatgaccccctcttcggttggctcagtgaccggcagttcctcagctcccagccccgcctgtgtggagaggagctgcttgtaggcagtgaggaggcggacagcatcaccttgggccggtatctccggcagctggcacgccatcggaacttcctgtggttcgtgagcatggacctggtgcaggtatggggagcagctcccggcccctctacagctgggctggacttcactcaaggggacagactcctcaagagctgggaactcggccacgcatggtggctcatgcctgtagtcccagcactttgggaggctgaggtgggtggatcacaaggtcaggagatcgagaccatcctggtgaatgaaaccccgtctctactaaaaatacaaaaaattagccgggcgtggcggcgggtgcctgtggtcccagctactcgggaggctgaggcaggagaatggcgtgaatccgggaggtggagcttacagtgagcggagatctggctactgcactccagcctgggcaacagagcgagactctgtctcaaaaaaaaaaaaaaaaaa

SEQ ID NO: 1342 - DNA, 1650 bp, Homo sapiens
  misc_feature (27)..(27): n equals a,t,g, or c
  misc_feature (103)..(103): n equals a,t,g, or c
  misc_feature (128)..(128): n equals a,t,g, or c
  misc_feature (1629)..(1629): n equals a,t,g, or c
ccgattgaaagcggccagtgagcgcancgcaattaatgtragtagctcactcattaggcacccaggctttwcactttatgcttccggctcgtatgttgtgtgnaattgtgagcggataccatttcacncagaaccagctatgaccatgattacgccaagctcgaaattaaccctcattaaagggaccaaaagctgragctccccgcggtggcggccgctctagaactagtggatcccccgggctgcaggaattcggcacgagcaaagacagccccaagaaggacggtggagtagtgtcctcgctaaaagacagtagatatgcaacgcctcttgctcctgccctttctcctgctgggaacagtttctgctcttcatctggagaatgatgccccccatctggagagcctagagacacaggcagacctaggccaggatctggatagttcaaaggagcaggagagagacttggctctgacggaggaggtgattcaggcagagggagaggaggtcaaggcttctgcctgtcaagacaactttgaggatgaggaagccatggagtcggacccagctgccttagacaaggacttccagtgccccagggaagaagacattgttgaagtgcagggaagtccaaggtgcaagacctgccgctacctattggtgcggactcctaaaacttttgcagaagctcagaatgtctgcagcagatgctacggaggcaaccttgtctctatccatgacttcaacttcaactatcgcattcagtgctgcactagcacagtcaaccaagcccaggtctggattggaggcaacctcaggggctggttcctgtggaagcggttttgctggactgatgggagccactggaattttgcttactggtccccagggcaacctgggaatgggcaaggctcctgtgtggccctatgcaccaaaggaggttattggcgacgagctcaatgcgacaagcaactgcccttcgtctgctccttctaagccagcggcacggagaccctgccagcagctccctcccgtcccccaacctctcctgctcataaatccagacttcccacagcaaaaaaaaaaaaaaaaaaactcgagggggggcccggtacccaattcgccctatagtgagtcgtattacaattcactggccgtcgttttacaacgtcgtgactgggaaaaccctggcgttacccaacttaatcgccttgcagcacatccccctttcgccagctggcgtaatagcgaagaggcccgcaccgatcgcccttcccaacagttgcgcagcctgaatggcgaatggcaaattgtaagcgttaatattttgttaaaattcgcgttaaatttttgttaaatcagctcattttttaaccaataggccgaaatcggcaaaatcccttataaatcaaaagaatagaccgagatagggttgagtgttgttccagtttggaacaagagtccactattaaagaacgtggactccaacgtcaaagggcgaaaaaccgtctatcagggcgatggsccactacgtgaaccatcaccctaatcaaggtttttggggtcgaggtgccgaaagcctaaatcggaccctaaaggagccccgattaaacttgcgggaaagccgcnaacgtggcaagaaggaaggaa

SEQ ID NO: 1343 - DNA, 300 bp, Homo sapiens
  misc_feature (288)..(288): n equals a,t,g, or c
  misc_feature (292)..(292): n equals a,t,g, or c
  misc_feature (297)..(297): n equals a,t,g, or c
ggcacgagccctgctgtgtcagtcacggggttattttgacactttccttctgaccaaagaaggggcagcccatcccccactgcgtctgagatcaatcctcacacgccaaggattacacagtggagaatctcatccgcatgggcatggcaggcttggtcctggtgttcctcgggattctgttatttgaggctcagcacagccagagaaacccccaagatgcagccgggaggttgaacagcggarargacaatgcacccttcacgtggtggacctcarggacaatctgangatncccanaag

SEQ ID NO: 1344 - DNA, 610 bp, Homo sapiens
  misc_feature (1)..(3): n equals a,t,g, or c
  misc_feature (7)..(7): n equals a,t,g, or c
  misc_feature (19)..(19): n equals a,t,g, or c
nnnagcnagttaacccaanagccccgggaggtgaacagcggagaggacaatgcacccttcagcgtggtggagcctcaggggacagatctgatgatcccagaaggctctggaggacaatctaggacgtccagaggggggtgagatttcaggccacacactgtggaaggtaatcatgtctgatcacaaattttgggtctccaccttacttccaatctatgttgtgaatgcccagttgagacccacggaaaagagctcatgggtgagtgtgaagtgcttctctgtcttaagttcccagagatccttgcytcttggaggcmagcaaacactaamtyttgaggaattcatgacaatatcatytgattcytccttcccagcttgtatggcagtytcccaccctcatgtgttcaatctgatgatcccaggragttctggaacaaaatctacagcctatgctttctggactatctgtcgatcattcctgaagagagggatcaatgttgaggtattcatttcacatgatgaaaatgacaatatcaaatgtcagaggtagtagggctcacgtagaaatccaatacatccatggtaggactgcaaattacttgaatcaatt

SEQ ID NO: 1345 - DNA, 885 bp, Homo sapiens; identical to SEQ ID NO: 126

SEQ ID NO: 1346 - DNA, 879 bp, Homo sapiens
ggaatctgcaccatgccctgggttctgctcctcctgaccctcctcactcactctgcagtgtcagtggtccaggcagggctgactcagcccccctcggtgtccaaggacttgagacagaccgccacactcacctgcaccgggaacaacaacaatgttggcgaccaaggagcagcttggctgcagcagcaccagggccaccctcccaaactcctgtcctacaggaataataaccggccctcagggatctcagagagattatctgcatccaggtcaggagccacatcctccctgaccattactggactccagcctgaggacgaggctgactattactgcgcagcatatgacagcagcctcgcagtttggatgttcggcggagggaccaagctgaccgtcctaggtcagcccaaggctgccccctcggtcactctgttcccaccctcctctgaggagcttcaagccaacaaggccacactggtgtgtctcataagtgacttctacccgggagccgtgacagtggcctggaaggcagatggcagccccgtcaaggcgggagtggagaccaccacaccctccaaacagagcaacaacaagtacgcggccagcagctacctgagcctgacgcccgagcagtggaagtcccacagaagctacagctgccaggtcacgcatgaagggagcaccgtggagaagacggtggcccctacagaatgttcataggttcccaactctaaccccacccacgggagcctggagctgcaggatcccaggggaggggtctctctccccatcccaagtcatccagcccttctccctgcactcatgaaaccccaataaatattctcattgtcaaccagaaaaaaaaaaaaaaaaaaaaaa

SEQ ID NO: 1347 - DNA, 927 bp, Homo sapiens
ctgcaggaattcggcacgagggaatctgcaccatgccctgggttctgctcctcctgaccctcctcactcactctgcagtgtcagtggtccaggcagggctgactcagcccccctcggtgtccaaggacttgagacagaccgccacactcacctgcaccgggaacaacaacaatgttggcgaccaaggagcagcttggctgcagcagcaccagggccaccctcccaaactcctgtcctacaggaataataaccggccctcagggatctcagagagattatctgcatccaggtcaggagccacatcctccctgaccattactggactccagcctgaggacgaggctgactattactgcgcascatatgacagcagcctcgcagtttggatgttcggcggagggaccaagctgaccgtcctaggtcagcccaaggctgccccctcggtcactctgttcccaccctcctctgaggagcttcaagccaacaaggccacactggtgtgtctcataagtgacttctacccgggagccgtgacagtggcctggaaggcagatagcagccccgtcaaggcgggagtggagaccaccacaccctccaaacaaagcaacaacaagtacgcggccagcagctayctgagcctgacgcctgagcagtggaagtcccacaraagctacagctgccaggtcacgcatgaagggagcaccgtggagaagacagtggcccctacagaatgttcataggttctcawccctcaccccccaccacgggagactagagctgcaggatcccaggggaggggtctctcctcccaccccaaggcatcaagcccttctccctgcactcaataaaccctcaataaatattctcattgtcaatcagaaaaaaaaaaaaaaaaaaaaaaaaaaaaaaaaaaaaaaaaaaaaaaaa

SEQ ID NO: 1348 - DNA, 879 bp, Homo sapiens
ggaatctgcaccatgccctgggttctgctcctcctgaccctcctcactcactctgcagtgtcagtggtccaggcagggctgactcagcccccctcggtgtccaaggacttgagacagaccgccacactcacctgcaccgggaacaacaacaatgttggcgaccaaggagcagcttggctgcagcagcaccagggccaccctcccaaactcctgtcctacaggaataataaccggccctcagggatctcagagagattatctgcatccaggtcaggagccacatcctccctgaccattactggactccagcctgaggacgaggctgactattactgcgcagcatatgacagcagcctcgcagtttggatgttcggcggagggaccaagctgaccgtcctaggtcagcccaaggctgccccctcggtcactctgttcccaccctcctctgaggagcttcaagccaacaaggccacactggtgtgtctcataagtgacttctacccgggagccgtgacagtggcctggaaggcagatagcagccccgtcaaggcgggagtggagaccaccacaccctccaaacagagcaacaacaagtacgcggccagcagctacctgagcctgacgcctgagcagtggaagtcccacagaagctacagctgccaggtcacgcatgaagggagcaccgtggagaagacggtggcccctacagaatgttcataggttcccaactctaaccccacccacgggagcctggagctgcaggatcccaggggaggggtctctctccccatcccaagtcatccagcccttctccctgcactcatgaaaccccaataaatattctcattgtcaatcagaaaaaaaaaaaaaaaaaaaaaa

SEQ ID NO: 1349 - DNA, 901 bp, Homo sapiens; identical to SEQ ID NO: 114
  misc_feature (8)..(8): n equals a,t,g, or c
  misc_feature (57)..(57): n equals a,t,g, or c
  misc_feature (68)..(68): n equals a,t,g, or c

SEQ ID NO: 1350 - DNA, 859 bp, Homo sapiens; identical to SEQ ID NO: 1330

SEQ ID NO: 1351 - DNA, 819 bp, Homo sapiens; identical to SEQ ID NO: 1324

SEQ ID NO: 1352 - DNA, 667 bp, Homo sapiens
  misc_feature (595)..(595): n equals a,t,g, or c
  misc_feature (637)..(637): n equals a,t,g, or c
aggtttttgacccttctttgtatctttttcagccgctacatctgttacttttgttggtgttatgggaatgagatcctactactatggaaaattcatgcctgtaggtttaattgcaggtgccaggtactttcattctattactcttctttaccatgtagagttcagtttattgcccagaatactttatgcattcaaaaccttacttgtttcagagtatctgatgctatgcatcaactgacgtttgacttatacactaataggagatgcttcaaaaacaatagttgatttaatgtcaaatgacatgagtatatccattcactgtggagatggctttgttctctggtcctagctccttcctatatggtggcagaagttttattgcaaagctatgactgcagccttttgtgtgacttgcggaggatgtgtgggggtcccatatttcttaggtgtgtaggtgtcttttgtagaaaattttgctaaaaggaaattttgattgaatcctgttttctaattttgattataatacctaaaccaaatgtggtttttaaaaaatgtagttgtaggccaggcacggtgggctcacgccctgtgaatnccaagcacagtggggaaggccatgggcggggcatattcaccntgaaggtcccagggaggtttgaagaaccca

SEQ ID NO: 1353 - DNA, 983 bp, Homo sapiens
ggcacgagggcagctgcagagctccaggtttctctgcccacaagggcaggggctgcccctcgcccaggatgactctgccttccagagccttggcctccctgggggtgggagtgtgggggatgctaaggttaaatcaggtcacagtaagttgtgggggcagcaggtggagcagcagagtggcactgggagctttctcttgggtgtgcggtgtggccttggttctgcagccatcaggtgggggcttgggactgacttctccttctgaaggatgctgggaaggtgagctggctttggcagtgcttagagctccggggggttccccctcctagaacatgcaagctctcacaccggtgcgtcatcatcacacccatcatcaagcccacagtggtatactgaacacctgccccacaaagacggtggactgctctcagaggagccccatgaaccaccgatggttacaactatccaatgcctgatggcagacagccaggccaacctcggcttccactctctcttcctcaccctacaatcagccaaagtgacctgagtcatgtagtgtgaagttgctttctgctttctcttgtttgtgcttttgctgtttcttctgccccatactttgttaactccatgagttaaatgctacccattttcccagacaagtgctgcttctgcaaggaaacccttcctgatcccccacctatctgaaaagtacctctccagcttgcttcttcagggtgctgagcgttccttcccagcctgtcatcaccttcctccatacgctatggtgtgttcctgtcttctctagtcttgtcctcttttttctgttagattgtagctccttgctgacaggaaccacgcctgctccagcttcatacctcccactgctacagcacagaacctgcttctcagacttacagcaaatgtttgtttgctgaatgaattaattaaagataaagcaaaaaaaaaaaaaaaaaaaactcgag

SEQ ID NO: 1354 - DNA, 987 bp, Homo sapiens
  misc_feature (31)..(31): n equals a,t,g, or c
  misc_feature (41)..(41): n equals a,t,g, or c
  misc_feature (971)..(971): n equals a,t,g, or c
ctcccttcctgagagctctcttgcgcaatcntcagcactgncctgccccagtggaggatttactcctatgccggcgacaacatcgtgaccgcccaggccatgtacgaggggctgtggatgtcctgcgtgtcgcagagcaccgggcagatccagtgcaaagtctttgactccttgctgaatctgagcagcacattgcaagcaacccgtgccttgatggtggttggcatcctcctgggagtgatagcaatctttgtggccaccgttggcatgaagtgtatgaagtgcttggaagacgatgaggtgcagaagatgaggatggctgtcattgggggcgcgatatttcttcttgcaggtctggctattttagttgccacagcatggtatggcaatagaatcgttcaagaattctatgaccctatgaccccagtcaatgccaggtacgaatttggtcaggctctcttcactggctgggctgctgcttctctctgccttctgggaggtgccctactttgctgttcctgtccccgaaaaacaacctcttacccaacaccaaggccctatccaaaacctgcaccttccagcgggaaagactacgtgtgacacagaggcaaaaggagaaaatcatgttgaaacaaaccgaaaatggacattgagatactatcattaacattaggaccttagaattttgggtattgtaatctgaagtatggtattacaaaacaaacaaacaaacaaaaaacccatgtgttaaaatactcagtgctaaacatggcttaatcttattttatcttctttcctcaatataggagggaagatttttccatttgtattactgcttcccattgagtaatcatactcaamtgggggaaggggtgctccttaaatatatatagatatgtatatatacatgtttttctattaaaaatagacagtaaaatactaaaaaaaaaaaaaaaaaccccggggggggnccggtacccattcgcc

SEQ ID NO: 1355 - DNA, 1908 bp, Homo sapiens; identical to SEQ ID NO: 239
  misc_feature (1869)..(1869): n equals a,t,g, or c

SEQ ID NO: 1356 - DNA, 414 bp, Homo sapiens
  misc_feature (386)..(386): n equals a,t,g, or c
  misc_feature (388)..(388): n equals a,t,g, or c
  misc_feature (413)..(413): n equals a,t,g, or c
aaggcacatctgtgccatagtgtgtatcagtacttcactctttttatggccaaataatattccattatatggatagacattttgttgatggacaattgggtttcattttattatttttagttgtactaattcagataatgtatgtttacatcctccatataaaagaagcaaataatatagatatccatgaagtaaaacattaaatcccctcacgcttctccttcagttctactcttctccccagaagtgactgcaggtgacaatctgccctgaatgtctctggccatatacattagattttttcacataacttcctagtcaactatgggcatcctagggggtgggtcctcccttgcccggggtgatctatgtgtcttctgggtaantnggcgccgaatgttcatatgctcaang

SEQ ID NO: 1357 - DNA, 869 bp, Homo sapiens
  misc_feature (2)..(2): n equals a,t,g, or c
  misc_feature (4)..(4): n equals a,t,g, or c
gngntaatgtatgcctacatggctccacccaaccccaagcaaataatatagatatccatgaagtaaaacattaaatcccctcacgcttctccttcagttctactcttctccccagaagtgactgcaggtgacaatctgccctgaatgtctctggccatatacattagattttttcacataacttcctagtcaactatgggcatcataggggatgggtcctcccttgcccggggtgatctatgtgtcttctgggtaaagtgggcgccgaatgttcatatgctcaatggatccctggggagtgtgggggagtcctgtagagagacgtttccttatctctgagcatccgtgttcaggtgtggacgggacagtgagtggctgggaggaagccagaatcaacagctccagccctctgcgctacaaccgccagatcggggagtttatagtcacccgggctgggctctactacctgtactgtcaggtgcactttgatgaggggaaggctgtctacctgaagctggacttgctggtggatggtgtgctggccctgcgctgcctggaggaattctcagccactgcggccagttccctcgggccccagctycgcctctgccaggtgtctgggctgttggccctgcggccagggtcctccctgcggatccgcaccctcccctgggcccatctcaaggctgcccccttcctcacctacttcggactcttccaggttcactgaggggccctggtctccccgcagtcgtcccaggctgccggctcccctcgacagctctctgggcacccggtcccctctgccccaccctcagccactctttgctccagacctgcccctccctctagaggctgcctgggcctgt

SEQ ID NO: 1358 - DNA, 1094 bp, Homo sapiens
  misc_feature (21)..(21): n equals a,t,g, or c
  misc_feature (1092)..(1092): n equals a,t,g, or c
cgggtcgacccacgcgtccgnttttttctttcaggggacatttctgtaatgtacaaaagaacctgcaaaaacaaaagcacctagggagacagaagactgggaaaggcccatgaagggcagagctctctcagtaatggaggaaactaataggactgctgctaatggagccccaggtgagccctgggattgcaaggccaccgctggcacaggcaaccatgcttgtgtggaggtgcaggcgtgagccctcctgcaagggggctctctgccagcacccatgcagggctcagaagggggcctggctgtggatcttgctgggttccagcagcacagaggcccactggcctctgacgcaacatacgcctggggaagtgtgcaggcccagcggagacagaactgccaagagtctggactcacggtagtcttcagactcgtccaggatctcggacctgatgatctcctcgatcacgtcctccagggtgaccaggcccaggacctcgtagaaggggtcgccttcaccctcgttgttcaccttctgcacgatggccaggtgggacttccctgtggggggaggacactcatggaacagcttgctgggccccccccagtttgattcatctcccctggtataggcccaccaaaaggacacggctaacgttcatgctcctacaacgtgccaggcacagagccacactcttttctaggtttttacttaagactcccagcgtgattatgagaactggccttattttcacacaggttgaaaatgaagcagtgggctcatgcccatctgcacaaggccccccaggcagagctggcagagctgggatccagctccaggtccgtgcacctccatgacatggatgcagtttagacaaggatgcctccctccagtggagaacacaaatgcctcacacatcagccagcctgcacatgcaggctaacaagggcactgactctggaaacacaggctctcctgcgacagtccacacggggcagctgagtggggccacccagcctgactgtccttgggaggatttcctaagtctttttcttcttaaagtaaatatatatgctgtccatcctaaaaaaaanct

SEQ ID NO: 1359 - DNA, 1271 bp, Homo sapiens
tgaaaaatgattttaaaatattatcttaaaagttttacaactttggtaattgtgaattttactcctgaattttcattaccaaatggatcaaaaatagtcctattaatatccagttagctattaacagctatcaatmtctcctytctcctctcatacctatagtatctgggaggtctagcagttcattgtgctgcaagtcaaggttggttatctgtgtacagtttccaatctcctttggaaggtgttcaagttgattgtgagctacatccagcgtaatgaggttacataattcaccaatktcagcaggtagttgtttaattttgttctctcgaatgctaagcatgctgagttttgacaagtttttgatgtccttttccacagtagttatacgattaaagcgaaggtaaagagtggtgagagaatccagcctatacaccactgaaggaatttctctcagtttattatgccgtaaatcaagcatccgcagcttcttcaagttatcaagagagtcaggcaaactggtaagtgaattttcacttagagccagtgtcatgagatttactaaacatcccacctctgctgggagggactgcaatttgttactgtataaataaagttctgttaattgagtcaactctttgattgatgatggcaatatgtgtatagatctcttggataagtccaaacgcattgaattctcttcccggcatttgttgagctctttaatcacctctgcattgctggatttttttctagtcccaggtgctgggtttggccgtttgatcgtattgtcaactgaaaatgccacccctggttgggcagcactggagtccttctttccatctttggcatctttccctttggtcttaggttctttttctttgctctctttcccaaaacctccagaggcttttgcctccttttctctttccttggctgatggtactttgggatctttttctttagagtctttttcttttcctaaactactactcatggtgactcaagcctggacaaaaactacatgaactccttttattttccagtaattgaattcaaagatgaagagacaaagatcctacacaatcaaaaaagtactggcttgaagaagtaatcagcatggagtaacatccatctgttacatgttggatctaaaagcactatgcccatttctgatcattcattccaactggtaaaatagtgctggtcaatcaatgattcattagagttccgtcaggagccccgactccgccatcctcctcgctcgcccc

SEQ ID NO: 1360 - DNA, 2172 bp, Homo sapiens
  misc_feature (1)..(2): n equals a,t,g, or c
  misc_feature (757)..(757): n equals a,t,g, or c
  misc_feature (2149)..(2150): n equals a,t,g, or c
  misc_feature (2157)..(2157): n equals a,t,g, or c
nntcgaaataaccctyactaawgggaacamaagctggagctcgcgcgcctgcaggtcgacactagtggatccaaagaattcggcacgagactagtctcgagggttcactcttgctgctgtatattctacaggttttgacaaatgtgtaatgacatgtaaccgtcattttttgtttgttttttgttttactgttttgttttgttttttgagactgagtctcgctctgttgcccaggctggagtgcaatggtgtgatctcagctcactgcaacctccgcctcccacgttcaagtgattctcctgcctcagcctcctgggtagctgggattacgggcacgtgccaccatgcctggctaatttttgtatttgtagtagagacaggggtttcaccatgttggtcaggctggtctcgaactcctgaaattgtgatccacctgcctcggcctcccaaagtgctgggattacaggcgtgagccaccacgcccagcccctgtaatcatcattatggtatcacacagaagagttttactgttccaaagtcctctttgctccagcattccttttttctctcaatcgctagcaaccactgatttttttccggcttccatcgttttccttttccaagaccaccatgtatttggaatggcacaatatgtagccttttcagattggctatttcacttggtaatatacacttcagtttcatccatgtcatcttatggcttgatagcactttttttttttgcactgaataatanttctattgkctggatgtaccacagtttatccattcatctactgaataatattttgtttgcttctaagttttggcaataatgaatacagctgctataaacatttgtgtgcagatgtttgtgtggacacaacttttcagttcatttggataaatacaaaggaatgcaattgctggacttttcggtaagagtttgtttagtcttgtaataaactgctagcccatcttccaaagttgctgtacaattttgcatttctacagcaatgaatgagatttcctgttgttccacatccttgccagaattttgtgtcatcagtatttggaattttcgctcttctaataggtatgcattggtgtgccattgttttaattttcaattccctaatggcatatgatgttgagcagtttttcttatacttattttcaatctatgtatcttctttgttgaaatgtctgttcagatatttcacctgttcttgactggggttttcattttttttattgttgagtttaagacttgtttgtacagtttgaataacaatcctttatcagatatagcttttgcaaatattttctcccagtctgtggcttgttttctcattctcttgatttttttttatttttatatacttttctatgtgcagaagaamcttgtttatttcagtaattttaggtattataaataattagaagaaataattgatgcctaaaaagtcctccttagtaactggcttggtatctggtttatgactatggagaaagccttgcaggaagctaaaaaacatctcctagcaagtcacaaatatagacaagctaagaaatctcagagtaaaaaaggttattcctacagtaagtggtagatcaggttaaacttggagaagtaaactggattattatcagttcttgatatctacagacaggctaataaacacaattagatatttctggcacacaaaagccaaacttatagccacagaggatattaaaattttttcagataaagattccttttctagtcttagtataatttaggactattttatttaccacacactaggaagttcttcatgtatcaatcagcagcaatttttatgttcatgtaaataaaacaagccaaataaaagaaagcaccaagtgaatcatactgattccaaaaattgttaaattaattgatgttgtcaaatccttgccttagggacaaaaacttgaacaccaacagaactaataccttgtgctgtcctcattagagtcagggtgcacctctcaagctatgtcagagagagagagagagagagaacaraactagtctmragagtacttctagagcggccgcgggcccatcgattttccacccgggtggggtaccrggtaagkgtacaaaattcgccgaaagatnntccttantctttcccttcacgg

SEQ ID NO: 1361 - DNA, 2045 bp, Homo sapiens
  misc_feature (2044)..(2045): n equals a,t,g, or c
ggggagggcagaggaggagagtcgcgggcggccgcttgggcgcacttgccgggtcaccttgtcccggaggagaaatggcttccctgaggcaagtgtaacctacattcccagcccaccagcctgacgcccagccagggagagagtaccatggatggcatcattgaacagaagagcatgctggtgcacagtaaaatcagtgatgctggcaagaggaatggtttaattaacaccagaaacttgatggccgagagcagagatggtctggtgtctgtttacccagcgccccagtaccagagccaccgggtgggggccagcacagtgccggccagcctggacagcagcaggagtgagccgatgcagcagctgctggaccccaacaccctgcagcagtcagtggagtcccgctaccggcccaacatcatcctctattcagagggcgtgctgcgctcctggggggacggtgtggccgccgactgctgcgagaccaccttcatcgaggaccggtcgcccaccaaagacagcctcgagtacccggatgggaagttcattgacctctcagctgatgacataaaaatccacaccctgtcctacgatgtggaggaggaggaggagttccaggagctggagagcgactactcaagcgacacagagagtgaggacaatttcctcatgatgcccccgcgggaccacctgggcctcagtgtcttctccatgctctgctgcttctggcctctgggmatcgcagccttctacttgtcccatgagaccaacaaagccgtggccaagggggacttgcaccaggccagcaccagctcccggcgggccctattcctggcagtgctgtccatcaccattgggactggcgtctatgtgggcgtggccgtggccctcatcgcctacctctccaagaacaaccacctgtgagcttcctgcgaatggagggggagcacccggggccaggtctgtgtggacgtggaggaagcaggcataccgcatgatgctgtacagtacaaatgattgccaaatgatgccacgargccctgggatttcctacccatggatttattttgtttttatcctttaatttcatgttcacagcactgtgtagagcaccagacagacgggcactgctaatccttccaaaggaaagctccaaagatcccagcccgcaaggctgtctctggatggattctggtggatgaatggcaacgcggctctctgcagcctgccagtgcccagagtgccaccgcattagcaatatacaaacagtccaaaaaagtgtttattttttatggaatacggtgcaataggcagaggacaagggacacatcactcttctgtctgtggccctgctggagtcctttgtgccccccggagtccacacgccttccctgcaagacgagaatggggctgggaagaaagaggcaacaccacggctggcaggagccccgctgcactgctctgcagacccattggcctgaccctgagaagcagagccagcaaagcccgggacctgcccctctttctttcccttcacaccaccccagcctcaggatgtcaagccacctccggaacgtgtctacactccacagctaccccgcagcaatacgcactcttgggacctcgctgatctaggatggggaggcaggccaccgcccctcccaagactcctcaagaaagagccccgcggttgctccggaaactcgaggcactgcagctatgggcactgcctcagcctaaagacacaggggcgcctcccaatcaccgcgctggcggatgctcaccccgtcataagcagaaactagtgatcctggaaatgagatgggccttactctgtcgactaaatgaatagctattttcttgtcattttttaaagtgcaactcttgcttcatgctgcttaagttaccagatgaatgctgagaaataagtaatcacagacattttaataccatttcattgctgttttacgagtgttcattacttaacaaaaaattatcttttagctttttaaaaaaaaaaaaaaaaacctcgggggggccccgnn

SEQ ID NO: 1362 - DNA, 847 bp, Homo sapiens
tggtggcggcatacatcgccttcacaatggcgctctgcagctgcgtgttctgcagcgtgtcgagcatcttcatctgctccatcacgctgtaaaacacatttgcaccgcgagtctgcccgtcctccacgggttcattgcggcgcagtgtagacctgggaggatgggcggcctgctgctggctgcttttctggctttggtctcggtgcccagggcccaggccgtgtggttgggaagactggaccctgagcagcttcttgggccctggtacgtgcttgcggtggcctcccgggaaaagggctttgccatggagaaggacatgaagaacgtcgtgggggtggtggtgaccctcactccagaaaacaacctgcggacgctgtcctctcagcacgggctgggagggtgtgaccagagtgtcatggacctgataaagcgaaactccggatgggtgtttgagaatccctcaataggcgtgctggagctctgggtgctggccaccaacttcagagactatgccatcatcttcactcagctggagttcggggacgagcccttcaacaccgtggagctgtacagtctgacggagacagccagccaggaggccatggggctcttcaccaagtggagcaggagcctgggcttcctgtcacagtagcaggcccagctgcagaaggacctcacctgtgctcacaagatccttctgtgagtgctgcgtccccagtagggatggcgcccacagggtcctgtgacctcggccagtgtccacccacctcgctcagcggctcccggggcccagcaccagctcagaataaagcgattccacagcaaaaaaaaaaaaaaaaaactcgag

SEQ ID NO: 1363 - DNA, 852 bp, Homo sapiens
ggcactctcaatggtggcggcatacatcgccttcacaatggcgctctgcagctgcgtgttctgcagcgtgtcgagcatcttcatctgctccatcacgctgtaaaacacatttgcaccgcgagtctgcccgtcctccacgggttcattgcggcgcagtgtagacctgggaggatgggcggcctgctgctggctgcttttctggctttggtctcggtgcccagggcccaggccgtgtggttgggaagactggaccctgagcagcttcttgggccctggtacgtgcttgcggtggcctcccgggaaaagggctttgccatggagaaggacatgaagaacgtcgtgggggtggtggtgaccctcactccagaaaacaacctgcggacgctgtcctctcagcacgggctgggagggtgtgaccagagtgtcatggacctgataaagcgaaactccggatgggtgtttgagaatccctcaataggcgtgctggagctctgggtgctggccaccaacttcagagactatgccatcatcttcactcagctggagttcggggacgagcccttcaacaccgtggagctgtacagtctgacggagacagccagccaggaggccatggggctcttcaccaagtggagcaggagcctgggcttcctgtcacagtagcaggcccagctgcagaaggacctcacctgtgctcacaagatccttctgtgagtgctgcgtccccagtagggatggcgcccacagggtcctgtgacctcggccagtgtccacccacctcgctcagcggctcccggggcccagcaccagctcagaataaagcgattccacagcaaaaaaaaaaaaaaaaaa

SEQ ID NO: 1364 - DNA, 1245 bp, Homo sapiens
  misc_feature (1076)..(1076): n equals a,t,g, or c
  misc_feature (1193)..(1193): n equals a,t,g, or c
  misc_feature (1234)..(1234): n equals a,t,g, or c
  misc_feature (1242)..(1242): n equals a,t,g, or c
  misc_feature (1244)..(1244): n equals a,t,g, or c
gggatcattaatacgactactatagggaaagctggtacgcctgcaggtaccggtccggaattcccgggtcgacccacgcgtccgtttttttttttttacctctttcatcactttttttttcaaagagacagggtcttgctctgttgcccagtctagagggcagtggcccgatcacggctcattgcagcctcaaacttctgggctcaagcgatcctcctgcctcagcctcctgaatagctgggactacaggcatgtgccaccacgcttggctatgtttttttggtagagatagggtcttgctgtgttgccaggctggtctcaaacccatagcctaaagcgattctcctgccttggctccccaaagtgctgggattacaggcatgagccacctcacccagcctcctcatcaccttctaacccactcttatcattttcttgttctgattgctttaccagctaactagaatgtttgggacgtggcagggcaggcagggggatggaggggccctggggacagtgtggctaaccagcctgtgcctgacctggagggcttggagctcatgccaggtgcctggcccgatgtcgccgacccggagccggttgtgcgccaggctgagctcccgcagttggtccaggccggccagaggctcgggctcgagcatccgcagctggttgcgttgcagctgcagggtgcgcaggccagtgggcaggcccatgggcagccgggttagctgattccctgccaggtcgaggctgcgcagggcacgcaaccggcggaaggcccggtggtgcacacgggcgctggccaggcggttataggccaggttaagctccgtcaggcccggtgtggcgaccaggtcacgggcacccagcgcggccacgtggttgtggggcagcaccagggcacgcaggcggcggggcagggctggaggcacgcggtccagcccattgccatagaggtgcagcgtgtgcaggccccgcagcggccgctctagaggatccaagcttacgtacgcgtgcatgcgacgtcatagctcttctatagtgtcacctaaattcaattcactggccgtcgntttacaacgtcgtgactgggaaaaccctkgcgttacccaacttaatcgccttgcagcacatccccctttcgcagctgcgtaatagcgaaaggcccgaccgatcgcctttccaacagnttgcgcagcctgaatggcgaatgggaccgccctgtaacggngcattaancnc

SEQ ID NO: 1365 - DNA, 756 bp, Homo sapiens
  misc_feature (16)..(16): n equals a,t,g, or c
  misc_feature (22)..(22): n equals a,t,g, or c
  misc_feature (36)..(36): n equals a,t,g, or c
  misc_feature (51)..(52): n equals a,t,g, or c
  misc_feature (57)..(58): n equals a,t,g, or c
ggattaacaaattttncacacnaggaaaacaggttnttgacccaattaggnnttttnncaaaaaagcttatttttaggttgacacttattagaagktacgccttgcaggttaccggttccggaattcccgggtcgacccasgsgtycgcggaccccagacatgaggaggctcctcctggtcaccagcctggtggttgtgctgctgtgggaggcaggtgcagtcccagcacccaaggtccctatcaagatgcaagtcaaacactggccctcagagcaggacccagagaaggcctggggcgcccgtgtggtggagcctccggagaaggacgaccagctggtggtgctgttccctgtccagaagccgaaactcttgaccaccgaggagaagccacgaggtcagggcaggggccccatccttccaggcaccaaggcctggatggagaccgaggacaccctgggccgtgtcctgagtcccgagcccgaccatgacagcctgtaccaccctccgcctgaggaggaccagggcgaggagaggccccggttgtgggtgatgccaaatcaccaggtgctcctgggaccggaggaagaccaagaccacatctaccacccccagtagggctccaggggccatcactgcccccgccctgtcccaaggcccaggctgttgggactgggaccctccctaccctgccccagctagacaaataaaccccagcaggccgggmaaaaaaaaaaaaaaaaaaaaagggcggccgc

SEQ ID NO: 1366 - DNA, 678 bp, Homo sapiens
ggcacgaggacattaggtgtagcatgtctacttttaagtccctcacccccaacccccatgctgtttgtataagttttgcttatttgtttttgtgcttcagtttgtccagtgctctctgcttgaatggcaagatagatttataggcttaattcttggtcaggcagaactccagatgaaaaaaacttgcatcttcagtatacttcctaaagggcaatcagataatggatatgttttatgtaattaagagttcactttagtggctttcatttaatatggctgtctgggaagaacagggttgcctagccctgtacaatgtaatttaaacttacagcatttttactgtgtatgatatggtgtcctctgtgccagttttgtaccttatagaggcagattgcctccgatcgctgtggttcttattatcaaaattaagtttacttgtatacggaacaaccacaagaaatttgattctgtaaagaatcctctttagctgtggcctggcagtatataaatggtgctttatttaacagaatacctgtggaggaaataaagcacacttgatgtaaaaataattgttttatttttattgacatgactgattgatttgctattctgtgcacttaattaaactgattgtgatgacaaaaaaaaaaaaaaaaaaaaaaaaaaaaaaaaaaaaaa

SEQ ID NO: 1367 - DNA, 992 bp, Homo sapiens
  misc_feature (11)..(11): n equals a,t,g, or c
  misc_feature (64)..(64): n equals a,t,g, or c
  misc_feature (279)..(279): n equals a,t,g, or c
  misc_feature (945)..(945): n equals a,t,g, or c
  misc_feature (983)..(983): n equals a,t,g, or c
caacccgcttntccccgcgcgttgcccgattcattaatgcagctggcacgacaggtttcccgantggaaagcgggcagtgagcgcaacgcaattaatgtgagttagctcactcattaggcaccccaggctttacactttatgcttccggctcgtatgttgtgtggaattgtgagcggataacaatttcacacaggaaacagctatgaccatgattacgccaagctcgaaattaaccctcactaaagggaacaaaagctggagctccaccgcggtggcgnccgctctagaactagtggatcccccgggctgcaggaattcggcacgagctcggcttccactgcagccatgtcactcctcttgctggtggtctcagcccttcacatcctcattcttatactgcttttcgtggccactttggacaagtcctggtggactctccctgggaaagagtccctgaatctctggtacgactgcacgtggaacaacgacaccaaaacatgggcctgcagtaatgtcagcgagaatggctggctgaaggcggtgcaggtcctcatggtgctctccctcattctctgctgtctctccttcatcctgttcatgttccagctctacaccatgcgacgaggaggtctcttctatgccaccggcctctgccagctttgcaccagcgtggcggtgtttactggcgccttgatctatgccattcacgccgaggagatcctggagaagcacccgcgagggggcagcttcggatactgcttcgccctggcctgggtggccttccccctcgccctggtcagcggcatcatctacatccacctacggaagcgggagtgagcgccccgcctcgctcggctgcccccgccccttcccggcccccctcgccgcgcgtcctccaaaaaataaaacyttaacsgcggaaaaaaaaaaaaaaaaaactcgangggggggcccggtacccaattcsscctatatgagtccntattacaat

SEQ ID NO: 1368 - DNA, 937 bp, Homo sapiens
  misc_feature (839)..(839): n equals a,t,g, or c
gattgagaggaggagagaaagagaaacgggagcaagagagaaggaggcccagacagtgagggcaggagggagagaagagacgcagaaggagagcgagcgagagagaaagggttctggattggaggggagagcaagggagggaggaaggcggtgagagaggcgggggcctcgggagggtgaaaggagggaggagaagggcggggcacggaggcccgagcgagggacaagactccgactccagctctgacttttttcgcggctctcggcttccactgcagccatgtcactcctcttgctggtggtctcagcccttcacatcctcattcttatactgcttttcgtggccactttggacaagtcctggtggactctccctgggaaagagtccctgaatctctggtacgactgcacgtggaacaacgacaccaaaacatgggcctgcagtaatgtcagcgagaatggctggctgaaggcggtgcaggtcctcatggtgctctccctcattctctgctgtctctccttcatcctgttcatgttccagctctacaccatgcgacgaggaggtctcttctatgccaccggcctctgccagctttgcaccagcgtggcggtgtttactggcgccttgatctatgccattcacgccgaggagatcctggagaagcacccgcgagggggcagcttcggatactgcttcgccctggcctgggtggccttccccctcgccctggtcagcggcatcatctacatccacctacggaagcgggagtgagcgccccgcctcgctcggctgcccccgccccttcccggcccccctcgccgcgcgtcctccaaaaaantaaaacyttaacggcggaaaaaaaaaaaaaaaaaaaaaaaaaaaaaaaaaaaaaaaaaaaaaaaaaaaaaaaaaaaaaaaaaaaaaaaaaaaactcga

SEQ ID NO: 1369 - DNA, 432 bp, Homo sapiens
  misc_feature (36)..(36): n equals a,t,g, or c
  misc_feature (38)..(38): n equals a,t,g, or c
  misc_feature (409)..(409): n equals a,t,g, or c
  misc_feature (426)..(426): n equals a,t,g, or c
gaaattaaccctcactaaagggaacaaaagctggangncggctctcggcttccactgcagccatgtcactcctcttgctggtggtctcagcccttcacatcctcattcttatactgcttttcgtggccactttggacaagtcctggtggactctccctgggaaagagtccctgaatctctggtacgactgcacgtggaacaacgacaccaaaacatgggcctgcagtaatgtcagcgagaatggctggctgaaggcggtgcaggtcctcatggtgctctccctcattctctgctgtctctccttcatcctgttcatgttccagctctacaccatgcgacggggagtctcttskkatkccamacggggcttccaactcttgccagtttgcaccagcgtggcggtgtttantggcggcttgactatgncattca

SEQ ID NO: 1370 - DNA, 1690 bp, Homo sapiens
ggcacgagccggtccccacctcggccccgggctccgaagcggctcgggggcgccctttcggtcaacatcgtagtccaccccctccccatccccagcccccggggattcaggctcgccagcgcccagccagggagccggccgggaagcgcgatgggggccccagccgcctcgctcctgctcctgctcctgctgttcgcctgctgctgggcgcccggcggggccaacctctcccaggacgacagccagccctggacatctgatgaaacagtggtggctggtggcaccgtggtgctcaagtgccaagtgaaagatcacgaggactcatccctgcaatggtctaaccctgctcagcagactctctactttggggagaagagagcccttcgagataatcgaattcagctggttacctctacgccccacgagctcatcatcagcatcagcaatgtggccctggcagacgagggcgagtacacctgctcaatcttcactatgcctgtgcgaactgccaagtccctcgtcactgtgctaggaattccacagaagcccatcatcactggttataaatcttcattacgggaaaaagacacagccaccctaaactgtcagtcttctgggagcaagcctgcagcccggctcacctggagaaagggtgaccaagaactccacggagaaccaacccgcatacaggaagatcccaatggtaaaaccttcactgtcagcagctcggtgacattccaggttacccgggaggatgatggggcgagcatcgtgtgctctgtgaaccatgaatctctaaagggagctgacagatccacctctcaacgcattgaagttttatacacaccaactgcgatgattaggccagaccctccccatcctcgtgagggccagaagctgttgctacactgtgagggtcgcggcaatccagtcccccagcagtacctatgggagaaggagggcagtgtgccacccctgaagatgacccaggagagtgccctgatcttccctttcctcaacaagagtgacagtggcacctacggctgcacagccaccagcaacatgggcagctacaaggcctactacaccctcaatgttaatgaccccagtccggtgccctcctcctccagcacctaccacgccatcatcggtgggatcgtggctttcattgtcttcctgctgctcatcatgctcatcttccttggccactacttgatccggcacaaaggaacctacctgacacatgaggcaaaaggctccgacgatgctccagacgcggacacggccatcatcaatgcagaaggcgggcagtcaggaggggacgacaagaaggaatatttcatctagaggcgcctgcccacttcctgcgccccccaggggccctgtggggactgctggggccgtcaccaacccggacttgtacagagcaaccgcagggccgcccctcccgcttgctccccagcccacccacccccctgtacagaatgtctgctttgggtgcggttttgtactcggtttggaatggggagggaggagggcggggggaggggagggttgccctcagccctttccgtggcttctctgcatttgggttattattatttttgtaacaatcccaaagcaaatctgtctccaggctggagaggcaggagccctggggtgagaaaagcaaaaaaaaaaaaaaaaaaaa

SEQ ID NO: 1371 - DNA, 2318 bp, Homo sapiens
tcgatacgasttttttttttttttttttttttgtcttaaacacacaggtgtttatttaattgttcatttgattgaatttttaagttcactttactacgtggatgagatgggtgcatattacagtaggctttcgctatgagcgctgccaccatgaggaatatcccagccctcagttctgcttccctttctgagtcccacaaaagccagatgtggacagccttgggttcccatcccagctggctgctccttctggggctgtcttggtggggagagggagatggggcagtgggtccctgctgacccctgagccctgcaggggtcaggatcctcccgtggtccctgggtgtggctctggaagacactggcagtgcccggccaaggcctcccgcaggatggaagttgagggccctggctctgggtcctaagagaactcagccgcccccttcacactttacagcaaggggccaggcagcagctttgggatggggcttccgtggagaagtgggggatgctgcagtggtacaaagacagcctcccccaccgccatcctccagctgaccgtcctccaaggccagcactgggcgtccaagggaaagaaggaactcagcccagagggtgtgggcaggagaggcctggagtcaggcctccacccacagccccctctgggtgccaagtgggaagggtgttggggctggcttgggaaccttacccgctgcccttccaacacctggatctgtgggcagcggtcccacaaaatcccccttggggctccctgaggaggacttgtggctgccgcttccaccagggcagagggcacaggaggggccagcactccaaagggctctagggtgggtctttcaaggacatctgcaaagccctggtggggaggggcctgggccagaggctctttggaactcttgcacttctgagtgggggactgtccatgctgcccacaacctctagaccatgcagcctgctcatgggtccctggcagagaatgcccactccccagcagactcagggcaggcccccaactgcaggcttccaggaaggcccagggtgtccacctcacgccaggtggtctcagaggacccctgtgcaaccacattaaggaaagctgcagcccccacccacccgcctgccagttcaacaagcaccggctgcacacgcaggctcccaggcaccatcacccccctcccccgtcgcccctccctcatggggagccccttccccctggaaagacagcaggtactgtagcctcgcctgctggccaggggcgccggctcagaggacctgccctgacctgcacgtgctgaccagacagcccagcgtaaggacccgygatcccacgccaccgccctgggtttaccacggtcaccrccacctctctcacagggcccccgggggacccagccgcgcccggcctggtgtctgcaccgagggaccgcgtctcacgcccggcggctcctgcaggggaagccgtggtcagcgactcaccacgaggacagggcagggcggctgagtgcggaagagaagcatgaagctgggggctggggtgggggaggaggaacaaaagttgcatctagacagaggtgaacgaaacaaaaccaaaacccgaacgtgttccgtcgcaggatgggcgccgcccgtcccgggcccttagcccgacatctcttctcgctgctccttgttcctgcgcacctcggccgcgtgcagctccttctcgcgcagccgctcgcgcagtgcggccaggtgtgcctcgcggatctccttgctgagctccatcttgtagttgagcttctcctccgcctggcggctgaagttgttattctcctccagcgccttgtgcagcacctcgcgctcgtgctcgcgccgctccgccagctgcttcagcacctgcgcctcctgcgtcttcctccgctcctcggctgcctccagccgcttttgcagctcctccagggaggtgtccttcttcttgggtggggaggagagcatagggctctctggggacaggtcagaaggggacttgaggatgacctcgaagctctggcctgaggcccgcttgtccagctgcttcacctccatgtccccgtactggtagacggtattggggtgcggctgtgtgtagaagcaggagcagatgagcgacagcaccgacagctccttcatcttctccttgtaggcggaaatggtgctggccatggtgctggcggcggttgggcctgcggaggctggagaggcgcaagtggcggccggagctgcagacggctggtgctgcmstgccggggaggggaggggagaggagtggagggagcgag

SEQ ID NO: 1372 - DNA, 657 bp, Homo sapiens
  misc_feature (2)..(2): n equals a,t,g, or c
  misc_feature (13)..(13): n equals a,t,g, or c
  misc_feature (25)..(25): n equals a,t,g, or c
  misc_feature (636)..(636): n equals a,t,g, or c
  misc_feature (648)..(648): n equals a,t,g, or c
  misc_feature (651)..(651): n equals a,t,g, or c
  misc_feature (655)..(655): n equals a,t,g, or c
tncgaattaaccnttaattaagggnaccaaaagctggagttccaccgcgttggcgccggttctagaacttagtggatccccggggctcwggaattgyacakattttttaaaactcaaagagggaaagagccttgtatcatatgtgaacattgtatcataggtaatgttgtacagacccttttatacagtgatctgtcttgttcctgcagcaaaaatcctctatggacataggaggtgctgtgtcccatgccctcttgccctgacagtgtcccatgggcccccttctgctccctgccccctccctgctactgctgatgcactctcctctccctgcagcccctggcttcccagccttcctcctgaccccttccaacagccttggaactccagctgccaccaccctctgggtcggacactgggacccactggcccagtcttggctgctgcttacccctagccttgatgcctgcccagggacccccagccccctcccgttgccctgcagctttaacagagtgaaccatgtgtattgtacaggcgcggttgtcattgcagaaaccgctgggtggagaagaagccgataaagtctatgaatcaaaaaaaaaaaaaaaaaactcgagggggggcccggtaccnaattcgccctanagngagngg

SEQ ID NO: 1373 - DNA, 1677 bp, Homo sapiens
  misc_feature (1592)..(1592): n equals a,t,g, or c
  misc_feature (1643)..(1643): n equals a,t,g, or c
  misc_feature (1659)..(1659): n equals a,t,g, or c
ggcacgagagaaagtgaccttcctggtgggtggggtggatcagagaagaattcatggaagaggtggcatttgattagggttacttggataattatcccatactgctcattgtcctctcttctgacccccttaaccacctgaaattgctgctggtgcatccttgacccaattctgatattcttgcttgatgttgcctgcttggtgttggttgtccatatgcctggcagggcgtgctgatgcccagctgtgtccatgccaggattccagaggagaaccagccacccagcaagcaggtgaagccactcttccgccacttccgccggatagactcctgtctgcagacccgggtggccttccggggctctgatgagatcttctgccgtgtatacatgcctgaccactcttatgtgaccatacgcagccgcctttcagcatctgtgcaggacattctgggctctgtgacggagaaacttcaatattcagaggagcccgcggggcgtgaggattccctcatcctggtagctgtgtcctcctctggagagaaggtccttctccagcccactgaggactgtgttttcaccgcactgggcatcaacagccacctgtttgcctgtactcgggacagctatgaggctctggtgcccctccccgaggagatccaggtctcccctggagacacagagatccaccgagtggagcctgaggacgttgccaaccacctaactgccttccactgggagctgttccgatgtgtgcatgagctggagttcgtggactacgtgttccacggggagcgcggccgccgggagacggccaacttggagctgctgctgcagcgctgcagcgaggtcacgcactgggtggccaccgaagtgctgctctgcgaggccccgggcaagcgcgcgcagctgctcaagaagttcatcaagatcgcggccctctgcaagcagaaccaggacctgctgtctttctacgccgtggtcatggggctggacaacgccgctgtcagccgccttcgactcacctgggagaagctgccagggaaattcaagaacttgtttcgcaaatttgagaacctgacggacccctgcaggaaccacaaaagctaccgagaagtgatctccaaaatgaagccccctgtgattcccttcgtgcctctgatcctcaaagacctgactttcctgcacgaagggagtaagacccttgtagatggtttggtgaacatcgagaagctggtgagtgagtggcactgcaaacccctagtcccacaagtggggggcttgcatcctctccctctctcatcacctcccaaaaatagcagccttcctccaagtgcccagcttgcctaacagactcttgactgtctccctggtggcatcactgtggcaacccacccacaggtggcagagctgacaggcagcttgggggcaacttcacctccccctcacatggcactctgktacacccacttctttggtccttcagagacccttcagaattggagactggagggaagtaaagcagagtgggagaatggcggaaggggagcataagaaggggaagcctctttctggggccccttttaagggttnattccttggcaattttcccaagcatttaaatgggcccgaaaaaaggtgganggacccaattcccggnaaaataacccgggaaacc

SEQ ID NO: 1374 - DNA, 1306 bp, Homo sapiens
  misc_feature (1003)..(1003): n equals a,t,g, or c
ctacgagttttttttttttttttttttttgagacggagtcttgctctgtcacccaggctggagtgcagtggtgcgatctcggctcactgcaagctccgcctcctgggttcatgccattctcctgcctcagactcctgagtagctgggactacaggcgcccgccaccacgcccggctaattttttgtatttttagtagagacggggtttcaccttgttagccaggatggtctcaatctcctgaccttgtgatccgcccgcctcggcctcccaaagtgctgggattacaggtgtgagccaccatgcccggccgccagagttctttttagcctgaccgacagcccatccaaagttgaaccagccaaatcctcgatgcatgaagcttcagggtcccctwrgcmmcagcctggccccatcagatatctgagtccaaaggaggttgaaggaggctcttgagcatcatcagctcagckggaaagaactttggagamctcctcccattctamaggttggaggatagaggccaggagaggaccagagacatgacatagcctgggcttctgatccctcgtcagggctgggcgagaggccgggctgatgggaggatgccaactgccttcttgttgtttctcctcccttcttggctcagagctgtctcctctctcctccctccatgctgctgctgctcctcctcctcctcttcctccttctccttttccctgtttttctcttttgttctttcctcgaggggaagggaggggctggaatctaaatggaggcagctgttcctaaggccatagggcgggggcagcggggacccgccattaactagctaaagacctggggctrggggtcagtttggctggctgagcccaggtgtttttattccagctcagggagccagagagtgagtgggagggagggaagcagggaggggtgggaggaagcagtgtgtggcagggactgtggcctggcaaacttaggggtggaggggtgggstggggnccgaagcttgtgcagctcacgtgtagtgctcgcatgggttgtgtatttggtctgtgttgtgggtggacagtgtgtgttttgtgtggcgtgaatatgtgagtggtgttcctgtgtgtgtgagattgtgcattatagttgagcagtggctcaagaggcagcagctcagctataatgcacaatctcacacgcagagtactaacctcgtgccgaattcctgcagcccgggggatccactagttctagagcggccgccaccgcggtggagctccagcttttgttccctttagtgagggttaatttcga

SEQ ID NO: 1375 - DNA, 3136 bp, Homo sapiens
ctttgaataaacggaacaaaagctggagctccaccgcgggcggccgctctagaactagtggatcccccgggctgcaggaattcggcacgagcaaggaggtgggagagggtagcagcatgggctacgcggttggctgccctcagtccccctgctgctgaagctgccctgcccatgcccacccaggccgtggggccaggggcctgccagggctaggagtgggcctgccgttcatgggtctctagggatttccgagatgcctgggaagagaggcttgggctggtggtgggcccggctgcccctttgcctgctcctcagcctttacggcccctggatgccttcctccctgggaaagcccaaaggccaccctcacatgaattccatccgcatagatggggacatcacactgggaggcctgttcccggtgcatggccggggctcagagggcaagccctgtggagaacttaagaaggaaaagggcatccaccggctggaggccatgctgttcgccctggatcgcatcaacaacgacccggacctgctgsctaacatcacgctgggcgcccgcattctggacacctgctccagggacacccatgccctcgagcagtcgctgacctttgtgcaggcgctcatcgagaaggatggcacagaggtccgctgtggcagtggyggcccacccatcatcaccaagcctgaacgtgtggwgggtgtcatcggtgcttcagggagctcggtctccatcatggtggccaacatccttcgcctcttcaagataccccagatcagctacgcctccacagcgccagacctgagtgacaacagccgctacgacttcttctcccgcgtggtgccctcggacacgtaccaggcccaggccatggtggacatcgtccgtgccctcaagtggaactatgtgtccacagtggcctcggagggcagctatggtgagagcggtgtggaggccttcatccagaagtcccgtgaggacgggggcgtgtgcatcgcccagtcggtgaagataccacgggagcccaaggcaggcgagttcgacaagatcatccgccgcctcctggagacttcgaacgccagggcagtcatcatctttgccaacgaggatgacatcaggcgtgtgctggaggcagcacgaagggccaaccagacaggccatttcttctggatgggctctgacagctggggctccaagattgcacctgtgctgcacctggaggaggtggctgagggtgctgtcacgatcctccccaagaggatgtccgtacgaggcttcgaccgctacttctccagccgcacgctggacaacaaccggcgcaacatctggtttgccgagttctgggaggacaacttccactgcaagctgagccgccacgccctcaagaagggcagccacgtcaagaagtgcaccaaccgtgagcgaattgggcaggattcagcttatgagcaggaggggaaggtgcagtttgtgatcgatgccgtgtacgccatgggccacgcgctgcacgccatgcaccgtgacctgtgtcccggccgcgtggggctctgcccgcgcatggaccctgtagatggcacccagctgcttaagtacatccgaaacgtcaacttctcaggcatcgcagggaaccctgtgaccttcaatgagaatggagatgcgcctgggcgctatgacatctaccaataccagctgcgcaacgattctgccgagtacaaggtcattggctcctggactgaccacctgcaccttagaatagagcggatgcactggccggggagcgggcagcagctgccccgctccatctgcagcctgccctgccaaccgggtgagcggaagaagacagtgaagggcatgccttgctgctggcactgcgagccttgcacagggtaccagtaccaggtggaccgctacacctgtaagacgtgtccctatgacatgcggcccacagagaaccgcacgggctgccggcccatccccatcatcaagcttgagtggggctcgccctgggccgtgctgcccctcttcctggccgtggtgggcatcgctgccacgttgttcgtggtgatcacctttgtgcgctacaacgacacgcccatcgtcaaggcctcgggccgtgaactgagctacgtgctgctggcaggcatcttcctgtgctatgccaccaccttcctcatgatcgctgagcccgaccttggcacctgctcgctgcgccgaatcttcctgggactagggatgagcatcagctatgcagccctgctcaccaagaccaaccgcatctaccgcatcttcgagcagggcaagcgctcggtcagtgccccacgcttcatcagccccgcctcacagctggccatcaccttcagcctcatctcgctgcagctgctgggcatctgtgtgtggtttgtggtggacccctcccactcggtggtggacttccaggaccagcggacactcgacccccgcttcgccaggggtgtgctcaagtgtgacatctcggacctgtcgctcatctgcctgctgggctacagcatgctgctcatggtcacgtgcaccgtgtatgccatcaagacacgcggcgtgcccgagaccttcaatgaggccaagcccattggcttcaccatgtacaccacttgcatcgtctggctggccttcatccccatcttctttggcacctcgcagtcggccgacaagctgtacatccagacgacgacgctgacggtctcggtgagtctgagcgcctcggtgtccctgggaatgctctacatgcccaaagtctacatcatcctcttccacccggagcagaacgtgcccaagcgcaagcgcagcctcaaagccgtcgttacggcggccaccatgtccaacaagttcacgcagaagggcaacttccggcccaacggagaggccaagtctgagctctgcgagaaccttgaggccccagcgctggccaccaaacagacttacgtcacttacaccaaccatgcaatctagcgagtccatggagctgarcagcaggaggaggagccgtgaccctgtggaaggtracctccarggccctgcctgtgtaattcagcccgccattgctcggtggataattaaagcatgtcaccataaaaaaaaaaaaaaaaaactcga

SEQ ID NO: 1376 - DNA, 3047 bp, Homo sapiens
ggcacgagcaaggaggtgggagagggtagcagcatgggctacgcggttggctgccctcagtccccctgctgctgaagctgccctgcccatgcccacccaggccgtggggccaggggcctgccagggctaggagtgggcctgccgttcatgggtctctagggatttccgagatgcctgggaagagaggcttgggctggtggtgggcccggctgcccctttgcctgctcctcagcctttacggcccctggatgccttcctccctgggaaagcccaaaggccaccctcacatgaattccatccgcatagatggggacatcacactgggaggcctgttcccggtgcatggccggggctcagagggcaagccctgtggagaacttaagaaggaaaagggcatccaccggctggaggccatgctgttcgccctggatcgcatcaacaacgacccggacctgctgcctaacatcacgctgggcgcccgcattctggacacctgctccagggacacccatgccctcgagcagtcgctgacctttgtgcaggcgctcatcgagaaggatggcacagaggtccgctgtggcagtggcggcccacccatcatcaccaagcctgaacgtgtggtgggtgtcatcggtgcttcagggagctcggtctccatcatggtggccaacatccttcgcctcttcaagataccccagatcagctacgcctccacagcgccagacctgagtgacaacagccgctacgacttcttctcccgcgtggtgccctcggacacgtaccaggcccaggccatggtggacatcgtccgtgccctcaagtggaactatgtgtccacagtggcctcggagggcagctatggtgagagcggtgtggaggccttcatccagaagtcccgtgaggacgggggcgtgtgcatcgcccagtcggtgaagataccacgggagcccaaggcaggcgagttcgacaagatcatccgccgcctcctggagacttcgaacgccagggcagtcatcatctttgccaacgaggatgacatcaggcgtgtgctggaggcagcacgaagggccaaccagacaggccatttcttctggatgggctctgacagctggggctccaagattgcacctgtgctgcacctggaggaggtggctgagggtgctgtcacgatcctccccaagaggatgtccgtacgaggcttcgaccgctacttctccagccgcacgctggacaacaaccggcgcaacatctggtttgccgagttctgggaggacaacttccactgcaagctgagccgccscgccctcaagaagggcagccacgtcaagaagtgcaccaaccgtgagcgaattgggcaggattcagcttatgagcaggaggggaaggtgcagtttgtgatcgatgccgtgtacgccatgggccacgcgctgcacgccatgcaccgtgacctgtgtcccggccgcgtggggctctgcccgcgcatggaccctgtagatggcacccagctgcttaagtacatccgaaacgtcaacttctcaggcatcgcagggaaccctgtgaccttcaatgagaatggagatgcgcctgggcgctatgacatctaccaataccagctgcgcaacgattctgccgagtacaaggtcattggctcctggactgaccacctgcaccttagaatagagcggatgcactggccggggagcgggcagcagctgccccgctccatctgcagcctgccctgccaaccgggtgagcggaagaagacagtgaagggcatgccttgctgctggcactgcgagccttgcacagggtaccagtaccaggtggaccgctacacctgtaagacgtgtccctatgacatgcggcccacagagaaccgcacgggctgccggcccatccccatcatcaagcttgagtggggctcgccctgggccgtgctgcccctcttcctggccgtggtgggcatcgctgccacgttgttcgtggtgatcacctttgtgcgctacaacgacacgcccatcgtcaaggcctcgggccgtgaactgagctacgtgctgctggcaggcatcttcctgtgctatgccaccaccttcctcatgatcgctgagcccgaccttggcacctgctcgctgcgccgaatcttcctgggactagggatgagcatcagctatgcagccctgctcaccaagaccaaccgcatctaccgcatcttcgagcagggcaagcgctcggtcagtgccccacgcttcatcagccccgcctcacagctggccatcaccttcagcctcatctcgctgcagctgctgggcatctgtgtgtggtttgtggtggacccctcccactcggtggtggacttccaggaccagcggacactcgacccccgcttcgccaggggtgtgctcaagtgtgacatctcggacctgtcgctcatctgcctgctgggctacagcatgctgctcatggtcacgtgcaccgtgtatgccatcaagacacgcggcgtgcccgagaccttcaatgaggccaagcccattggcttcaccatgtacaccacttgcatcgtctggctggccttcatccccatcttctttggcacctcgcagtcggccgacaagctgtacatccagacgacgacgctgacggtctcggtgagtctgagcgcctcggtgtccctgggaatgctctacatgcccaaagtctcatcatcctcttccacccggagcagaacgtgcccaagcgcaagcgcagcctcaaagccgtcgttacggcggccaccatgtccaacaagttcacgcagaagggcaacttccggcccaacggagaggccaagtctgagctctgcgagaaccttgaggccccagcgctggccaccaaacagacttacgtcacttacaccaaccatgcaatctagcgagtccatggagctgagcagcaggaggaggagccgtgaccctgtggaaggtaacctccaaggccctgcctgtgtaattcagcccgccattgctcggtggataattaaagcatgtcaccataaaaaaaaaaaaaaaaaa

SEQ ID NO: 1377 - DNA, 1727 bp, Homo sapiens
tatgcagccctgctcaccaagaccaaccgcatttaccgcatcttcgagcagggcaagcgctcggtcagtgccccacgcttcatcagccccgcctcacagctggccatcaccttcagcctcatctcgctgcagctgctgggcatctgtgtgtggtttgtggtggaccctcccactcggtggtggacttccaggaccagcggacactcgacccccgcttcgccaggggtgtgctcaagtgtgacatctcggacctgtcgctcatctgcctgctgggctacagcatgctgctcatggtcacgtgcaccgtgtatgccatcaagacacgcggcgtgcccgagaccttcaatgaggccaagcccattggcttcaccatgtacaccacttgcatcgtctggctggccttcatccccatcttctttggcacctcgcagtcggccgacaagctgtacatccagacgacgacgctgacggtctcggtgagtctgagcgcctcggtgtccctgggaatgctctacatgcccaaagtctacatcatcctcttccacccggagcagaacgtgcccaagcgcaagcgcagcctcaaagccgtcgttacggtggccaccatgtccaacaagttcacgcagaagggcaacttccggcccaacggagaggccaagtctgagctctgcgagaaccttgaggccccagcgctggccaccaaacagacttacgtcacttacaccaaccatgcaatctagcgagtccatggagctgagcagcaggaggaggagccgtgaccctgtggaaggtgcgtcccggccagggccacacccaagggcccagctgtcttgcctgcccgtgggcacccacggacgttggcttggtgctgaggatagcaaaaccccagccatcactgctggcagcctgggcaaaccgggtgagcaacaggaggacgaggggccggggcggtgccaggctaccacaagaacctgcgtcttggaccattgcccctcccggccccaaaccacaggggctcaggtcgtgtgggccccagtgctagatctctccctccttcgtctctgtctgtgctgttggcgacccctctgtctgtctccagccctgtctttctgttctcttatctctttgtttcaccttttccctctctggcgtccccggctgcttgtactcttggccttttctgtgtctcctttctggctcttgcctccgcctctctctctcatcctctttgtcctcagctcctcctgctttcttgggtcccaccagtgtcacttttctgccgttttctttcctgttctcctctgcttcattctcgtccagccattgctcccctctccctgccacccttccccagttcaccaaaccttacatgttgcaaaagagaaaaaaggaaaaaaaatcaaaacacaaaaaagccaaaacgaaaacaaatctcgagtgtgttgccaagtgctgcgtcctcctggtggcctctgtgtgtgtccctgtggcccgcagcctgcccgcctgccccgcccatctgccgtgtgtcttgcccgcctgccccgcccgtctgccgtctgtcttgcccgcctgcccgcctgcccctcctgccgaccacacggagttcagtgcctgggtgtttggtgatggttattgacgacaatgtgtagcgcatgattgtttttataccaagaacatttctaataaaaataaacacatggttttgcaaaaaaaaaaaaaaaaaa

SEQ ID NO: 1378 - DNA, 2821 bp, Homo sapiens
  misc_feature (2791)..(2791): n equals a,t,g, or c
  misc_feature (2799)..(2799): n equals a,t,g, or c
gtgggagagcctgactgaggtgtctctagccagtctaattgccgttcctttagctagtggcatcttgattcctgctgtgtcttaactgaccattgtcttaaattctagagtggatcatgacccatgaagagcaccatgcagccaaaaccctggggattggcaaagccattgctgtcttaacctctggtggagatgcccaaggtatgaatgctgctgtcagggctgtggttcgagttggtatcttcaccggtgcccgtgtcttctttgtccatgagggttatcaaggcctggtggatggtggagatcacatcaaggaagccacctgggagagcgtttcgatgatgcttcagctgggaggcacggtgattggaagtgcccggtgcaaggactttcgggaacgagaaggacgactccragctgcctacaacctggtgaagcgtgggatcaccaatctctgtgtcattgggggtgatggcagcctcactggggctgacaccttccgttctgagtggagtgacttgttgagtgacctccagaaagcaggtaagatcacagatgaggaggctacgaagtccagctacctgaacattgtgggcctggttgggtcaattgacaatgacttctgtggcaccgatatgaccattggcactgactctgccctgcatcggatcatggaaattgtagatgccatcactaccactgcccagagccaccagaggacatttgtgttagaagtaatgggccgccactgtggatacctggcccttgtcacctctctgtcctgtggggccgactgggtttttattcctgaatgtccaccagatgacgactgggaggaacacctttgtcgccgactcagcgagacaaggacccgtggttctcgtctcaacatcatcattgtggctgagggtgcaattgacaagaatggaaaaccaatcacctcagaagacatcaagaatggcagcaggatgggtgtggaagcagtgatggcacttttggaggggaccccagataccccagcctgtgtagtgagcctctctggtaaccaggctgtgcgcctgcccctcatggaatgtgtccaggtgaccaaagatgtgaccaaggccatggatgagaagaaatttgacgaagccctgaagctgagaggccggagcttcatgaacaactgggaggtgtacaagcttctagctcatgtcagacccccggtatctaagagtggttcgcacacagtggctgtgatgaacgtgggggctccggctgcaggcatgaatgctgctgttcgctccactgtgaggattggccttatccagggcaaccgagtgctcgttgtccatgatggtttcgagggcctggccaaggggcagatagaggaagctggctggagctatgttgggggctggactggccaaggtggctctaaacttgggactaaaaggactctacccaagaagagctttgaacagatcagtgccaatataactaagtttaacattcagggccttgtcatcattgggggctttgaggcttacacagggggcctggaactgatggagggcaggaagcagtttgatgagctctgcatcccatttgtggtcattcctgctacagtctccaacaatgtccctggctcagacttcagcgttggggctgacacagcactcaatactatctgcacaacctgtgaccgcatcaagcagtcagcagctggcaccaagcgtcgggtgtttatcattgagactatgggtggctactgtggctacctggctaccatggctggactggcagctggggccgatgctgcctacatttttgaggagcccttcaccattcgagacctgcaggcaaatgttgaacatctggtgcaaaagatgaaaacaactgtgaaaaggggcttggtgttaaggaatgaaaagtgcaatgagaactataccactgacttcattttcaacctgtactctgaggaggggaagggcatcttcgacagcaggaagaatgtgcttggtcacatgcagcagggtgggagcccaaccccatttgataggaattttgccactaagatgggcgccaaggctatgaactggatgtctgggaaaatcaaagagagttaccgtaatgggcggatctttgccaatactccagattcgggctgtgttctggggatgcgtaagagggctctggtcttccaaccagtggctgagctgaaggaccagacagattttgagcatcgaatccccaaggaacagtggtggctgaaactgaggcccatcctcaaaatcctagccaagtacgagattgacttggacacttcagaccatgcccacctggagcacatcacccggaagcggtccggggaagctgccgtctaaacctctctggagtgaggggaatagattacctgatcatggtcagctcacaccctaataagtccacatcttctcagtgttttagctgtttttttcattaggtttccttttattctgtaccttgcagccatgaccagttctggccaggagctggaggagcaggcagtgggtgggagctccttttaggtagaatttaacatgacttctgccccagctttatctgtcacacaaggctgggcacctctagtgctactgctagatatcacttactcagttagaattttcctaaaaataagctttatttatttctttgtgataacaaagagtcttggttcctctactacttttactacagtgacaaattgtaactacactaataaatgccaactggtcactgtgaaaaaaaaaaaaaaaaaaaaaaaaaattncggcgaancttatcctttgtggggtaattt

SEQ ID NO: 1379 - DNA, 4762 bp, Homo sapiens
  misc_feature (4747)..(4747): n equals a,t,g, or c
  misc_feature (4751)..(4751): n equals a,t,g, or c
aagttgtcgttctgtgggctgcggaacgcagacttcggctggacttgcctgcggtgacacctgctcccctctgagagcttcaggttctccggcctgccttcactggtttgtgtccagagccggactgattctctcaatttgcgatcttcagcctgttaaacaagaaaacgaaaaaccccttccagaaaacatggatgcatttgaaaaagtgagaacaaaattagaaacacagccacaagaagaatatgaaatcatcaatgtggaagttaaacatggtggttttgtttattaccaagaaggttgttgcttggttcgttccaaagatgaagaagcagacaatgataattatgaagttttattcaatttggaggaacttaagttagaccagcccttcattgattgtatcagagttgctccagatgaaaaatatgtggctgccaagataagaactgaagattctgaagcatctacctgtgtaattataaagctcagcgatcagcccgtaatggaagcttctttcccgaatgtgtccagttttgaatgggtaaaggacgaggaagatgaagatgttttattctacaccttccagaggaaccttcgctgtcatgacgtatatcgagccacttttggtgataacaaacgtaatgaacgcttttacacagaaaaagacccaagctactttgttttcctttatcttacaaaagacagtcgtttcctcaccataaatattatgaacaagactacttctgaagtgtggttgatagatggcctgagcccttgggacccaccagtacttatccagaagcgaatacatggggtcctttactatgttgaacacagagatgatgaattatacattctcactaatgttggagaacctacagaatttaagctaatgagaacagcggctgatacccctgcaattatgaattgggatttattttttacaatgaagagaaatacaaaagtgatagacttggacatgtttaaggatcactgtgttctatttctgaagcacagcaatctcctttatgttaatgtgattggtctggctgatgattcagttcggtctctaaagctccctccttgggcctgtggattcataatggatacaaattctgacccaaagaactgcccctttcaactttgctctccaatacgtcccccaaaatattacacatacaagtttgcagaaggcaaactgtttgaggaaactgggcatgaagacccaatcacaaagactagtcgcgttttacgtctagaagccaaaagcaaggatggaaaattagtgccaatgactgttttccacaaaactgactctgaggacttgcagaagaaacctctcttggtacatgtatatggagcttatggaatggatttgaaaatgaatttcaggcctgagaggcgggtcctggtggatgatggatggatattagcatactgccatgttcgaggtggtggtgagttaggcctccagtggcacgctgatggccgcctaactaaaaaactcaatggccttgctgatttagaggcttgcattaagacgcttcatggccaaggcttttctcagccaagtctaacaaccctgactgctttcagtgctggaggggtgcttgcaggagcattgtgtaattctaatccagagctggtgagagcggtgactttggaggcacctttcttggatgttctcaacaccatgatggacactacacttcctctgacattagaagaattagaagaatgggggaatccttcatctgatgaaaaacacaagaactacataaaacgttactgtccctatcaaaatattaaacctcagcattatccttcaattcacataacggcatatgaaaacgatgaacgggtacctctgaaaggaattgtaagttatactgagaaactcaaggaagccatcgcggagcatgctaaggacacaggtgaaggctatcagacccctaatattattctagatattcagcctggaggcaatcatgtaattgaggattctcacaaaaagattacagcccaaattaaattcctgtacgaggaacttggacttgacagcaccagtgttttcgaggatcttaagaaatacctgaaattctgaaacactgcattcaactgggaattggaaacacactgaaatatttcatagtcttacttccaattgagttagcaaaaaaaaaattaataacttgagacttttaagttattaattttttaaaatgtgcttctccatctaaattttgcttagtctacatctcacttgcttatactattctctccattgatgcacatgcccattaacctaggaaagtarttttcaaatcatgctccttagaaggatgtggagtagagggaagggaaggattggtgatagcagagctccaggcctcccttccagtcagaacagttgagcagtttacaaattagtgtcctgcctctttgctagcaaatgcttttagacactgtggcagtgagtcatcctctaatttctatgactgcattttaagggaaaagataaaattcttccccttaaaattcgttaaagtttttgaataatctggggtcctaatgtgttctggtcatccctgattgatgctatctgaataaagttataagctcctataagccataatttacttttaaacattttatttttttcaaaacatttgagaacctttcttaaagcrgttacattcaagctacagaaatatcgaagaattaatgattgttcaccaagcagcatgctgtacatgaagctattacaaatgcttacaatcccactgaaatgccagtgtcttcatctcttcataaaggtgcctaacacgaggtatacagtatgttcagtacactggaatagcatgctcgattggaaacaaagcatctatctctgaaagctgtttggcgatgaaggagattcttcgtgttgtgttcaaagatgagtccctctcccttgtccagaaaaatgccacttgtatcaactttactgcctttgtcggcagaattggtacttaaccttattctyattttagcgggaaggcccgaaatcatattatgtagatttaacagtgttgattctccaaaattcagaaccacgataaagattctgtcgatgccatccagctctcttgtgtacacaacatagtggctgtcattcctcaaatggcaaaaccagcccctgttgaggagtagctcattggcatgaagtagacttaaatcttgatataacttcaaagccgatctgggctgagtcttttggacctatttttttaaaaaagtatttacgtaagtgtttgattctaagaattgtttgtaagtatttttaatatattgtaaggagttatttacccaaaacacttgctccaattttgccccttataattgccaaattgtaagcatcaataagtaggtaagaacaatttatataaaaactgatagaaatgacaaattcggggtttcggcttgtccgggagtcaataagtacgcacagtgctctgctacattgtagagtttctgtagagatcaaatttgactccactttaggagtcccaaagcaaatgtccatgtctaagatgaatatttaacttgcatagtcattctgtgctatattgtaactgccagatggccagaaagaaggcaacagtggactcagacttctgaggaatttgggtttgttcccctttgtagactaatgtgtaggttgctgttgtgcgaagatcgtgtaactttagcagacatgtatttcttgcacagctaatagaagacaaagttgaaaaaaaggatgcaaaataaaaagctgcctaaggtgaaagttagaaattgtagacttttttttaccataatagtatgtgttcattraagatgatttgggtttattttacagctatataaaacataatttgatgatgtacttctaacctttcaagcattttctgttattgactatataatatagcctccataaatgtttttaatgacaatattctgttgaacggttgtaccatactcagccatgccctttcattttgacgatagtgtttctaatattttgtatttttattcccctccccccatttttgtattacttaagatagattatcagaaagacagttactttgtcaaagagtatgggcacttgatacataatgccaaattattcttcataagagctgttgccaaatcagtgataatgttcatttaattgtattcttgccagccatgtttactggggtgatagttgttattgtggttgttattgttctttaggggtaggttcccaatatgtggtctttaaataattatctaatggtgtttaaaaagatgtttattctgtttgtcaggtacaaagatatttatgatacatgtatgacttgtctaagttattaacattttctctagccttaggtaatgcatgaaagcacatgtttcagtgccactcacataagaagtgcccggtaagtgttagctattattgtctacttgagttactactttctaaaagtatgttgaagtctttttctgtaattgcagatttgttgattttgcatttgagtattttctatattttgaagctgttagatgcatagtcatgatttttggtggaatgttttatcaatttttgaaaattgcctttgtctcatataatgcttttcatattgaactatattttgtctgctattaaatacttccaagcctgaaaaaaaaaaaaaaaaaaaaaaaaaaaaaaaaaaaaaaaaaaaaaaancccnggggggggccc

SEQ ID NO: 1380 - DNA, 2155 bp, Homo sapiens
  misc_feature (1396)..(1396): n equals a,t,g, or c
gccggctggcagcacgactcgcgtagccgtgcgccgattgcctctcggcctgggcaatggtcccggctgccggtcgacgaccgccccgcgtcatgcggctcctcggctggtggcaagtattgctgtgggtgctgggacttcccgtccgcggcgtggaggttgcagaggaaagtggtcgcttatggtcagaggagcagcctgctcaccctctccaggtgggggctgtgtacctgggtgaggaggagctcctgcatgacccgatgggccaggacagggcagcagaagaggccaatgcggtgctggggctggacacccaaggcgatcacatggtgatgctgtctgtgattcctggggaagctgaggacaaagtgagttcagagcctagcggcgtcacctgtggtgctggaggagcggaggactcaaggtgcaacgtccgagagagccttttctctctggatggcgctggagcacacttccctgacagagaagaggagtattacacagagccagaagtggcggaatctgacgcagccccgacagaggactccaataacactgaaagtctgaaatccccaaaggtgaactgtgaggagagaaacattacaggattagaaaatttcactctgaaaattttaaatatgtcacaggaccttatggattttctgaacccaaacggtagtgactgtactctagtcctgttttacaccccgtggtgccgcttttctgccagtttggcccctcactttaactctctgccccgggcatttccagctcttcactttttggcactggatgcatctcagcacagcagcctttctaccaggtttggcaccgtagctgttcctaatattttattatttcaaggagctaaaccaatggccagatttaatcatacagatcgaacactggaaacactgaaaatcttcatttttaatcagacaggtatagaagccaagaagaatgtggtggtaactcaagccgaccaaataggccctcttcccagcactttgataaaaagtgtggactggttgcttgtattttccttattctttttaattagttttattatgtatgctaccattcgaactgagagtattcggtggctaattccaggacaagagcaggaacatgtggagtagtgatggtctgaagaagttggaaagaggaacttcaatccttcgtttcagarattagtgctacagtttcatacattttctccagtgacgtgttgacttgaaacttcaggcagattaaaagaatcatttgttgaacaactgaatgtataaaaaaattatgaaactggtgttttaactagtattgcaataagcaaatgcaaaaatattcaatagatgcactattcttgtttttactgcatgmacgtaatccagtatttggnaaagtaatccaktttgaaatgtgragrtgtattccggcagaatagtgagtagaatgacagcttactatacagaaggcaaaaataggactctcaggtaatagtttaaggaaacccttgattccttatatatgtttaagaaggttagttttctgtttctttgcagtttttcttctagagtccatagcaggaaagtatgtaaccagaattggttagtgtgagccactgcgcctggcctaaacaaactttttgaaaagctgtttctaaaagattccttaaattcagatatgacagctaattacctcatcataaattacttttatactaattgtttccagggttttagagtagttgaatgtttatttcacaaggcaccctaaattctatagaaataaaacctcagatgagtctccttcttagagtgttacaatgaatgggagtttacaacttttatgtgtcatgtttccaacagctgtgtttggggtggtcactggcaggaggggaccgtatctcagaatggcacattatttctattttacacatgagcaaattgaggcatagagagttagataacttgcccaggttacacagattgtaagttgatgaagctgggatttgaatcttcacatgtgtgtacttataaatacaaatgtaaggaaaactctagtgagtccacctcttatattgagttattactgtgtgagtgccaagtwctgttttagatgctttacatatactattttgtttaatatcctttttaaa

SEQ ID NO: 1381 - DNA, 308 bp, Homo sapiens
  misc_feature (53)..(53): n equals a,t,g, or c
  misc_feature (153)..(153): n equals a,t,g, or c
agtttttttcgggtttttctttgggcagtttttttttttttttaggagttccnttaggccagggaaagtatgttaaccaggaattgggtttagtgggaccccccttcaagtagcaagggatgggaaaattaggagtcaaataccttgatgttngtgatytctaactcaaaaaatttgaagtgttttaagttgtttctgggtaagggagatgttaggagaaaggaaatgctgtaactaaagctcaattattatcagttctatgctaacgtatacattttaatcatagttacctaagcagcatgcattaa

SEQ ID NO: 1382 - DNA, 1277 bp, Homo sapiens
  misc_feature (1210)..(1210): n equals a,t,g, or c
  misc_feature (1236)..(1236): n equals a,t,g, or c
  misc_feature (1271)..(1271): n equals a,t,g, or c
ggaattcggacgagtcgtccagcccgcggcgagagcgggtatgtgggcgggaggccggagcagctgtcaggctgaagtcctgcgagcgacgcgcggcggggcggcgagaggaaacgcggcgccgggccgggccctggagatggtccccggcgccgcgggctggtgttgtctcgtgctctggctccccgcgtgcgtcgcggcccacggcttccgtatccatgattatttgtactttcaagtgctgagtcctggggacattcgatacatcttcacagccacacctgccaaggactttggtggtatctttcacacaaggtatgagcagattcaccttgtccccgctgaacctccagaggcctgcggggaactcagcaacggtttcttcatccaggaccagattgctctggtggagagggggggctgctccttcctctccaagactcgggtggtccaggagcacggcgggcgggcggtgatcatctctgacaacgcagttgacaatgacagcttctacgtggagatgatccaggacagtacccagcgcacagctgacatccccgccctcttcctgctcggccgagacggctacatgatccgccgctctctggaacagcatgggctgccatgggccatcatttccatcccagtcaatgtcaccagcatccccacctttgagctgctgcaaccgccctggaccttctggtagaagagtttgtcccacattccagccataagtgactctgagctgggaaggggaaacccaggaattttgctacttggaatttggagatagcatctggggacaagtggagccaggtagaggaaaagggtttgggcgttgctaggctgaaagggaagccacaccactggccttcccttccccagggcccccaagggtgtctcatgctacaagaagaggcaagagacaggccccagggcttctggctagaacccgaaacaaaaggagctgaaggcaggtggcctgagagccatctgtgacctgtcacactcacctggctccagcctcccctacccagggtctctgcacagtgaccttcacagcagttgttggagtggtttaaagagctggtgtttggggactcaataaaccctcactgactttttagcaataaagcttctcatcagggttaaaaaaaaaaaaaaaaaaaaaaaaaaaaaaaaaaaaaaaaaactcgagggggggcccggnacccaattcgccctatagggagtcgnattacaattcactggccgtcgttttacaacgtcgngactgg

SEQ ID NO: 1383 - DNA, 1160 bp, Homo sapiens
ggcacgagtcgtccagcccgcggcgagagcgggtatgtgggcgggaggccggagcagctgtcaggctgaagtcctgcgagcgacgcgcggcggggcggcgagaggaaacgcggcgccgggccgggcccggccctggagatggtccccggcgccgcgggctggtgttgtctcgtgctctggctccccgcgtgcgtcgcggcccacggcttccgtatccatgattatttgtactttcaagtgctgagtcctggggacattcgatacatcttcacagccacacctgccaaggactttggtggtatctttcacacaaggtatgagcagattcaccttgtccccgctgaacctccagaggcctgcggggaactcagcaacggtttcttcatccaggaccagattgctctggtggagagggggggctgctccttcctctccaagactcgggtggtccaggagcacggcgggcgggcggtgatcatctctgacaacgcagttgacaatgacagcttctacgtggagatgatccaggacagtacccagcgcacagctgacatccccgccctcttcctgctcggccgagacggctacatgatccgccgctctctggaacagcatgggctgccatgggccatcatttccatcccagtcaatgtcaccagcatccccacctttgagctgctgcaaccgccctggaccttctggtagaagagtttgtcccacattccagccataagtgactctgagctgggaaggggaaacccaggaattttgctacttggaatttggagatagcatctggggacaagtggagccaggtagaggaaaagggtttgggcgttgctaggctgaaagggaagccacaccactggccttcccttccccagggcccccaagggtgtctcatgctacaagaagaggcaagagacaggccccagggcttctggctagaacccgaaacaaaaggagctgaaggcaggtggcctgagagccatctgtgacctgtcacactcacctggctccagcctcccctacccagggtctctgcacagtgaccttcacagcagttgttggagtggtttaaagagctggtgtttggggactcaataaaccctcactgactttttagcaataaagcttctcatcagggttaaaaaaaaaaa

SEQ ID NO: 1384 - DNA, 1160 bp, Homo sapiens; identical to SEQ ID NO: 1383

SEQ ID NO: 1385 - DNA, 920 bp, Homo sapiens
gcggccgccctttttttttttttttttttttttttgtggtggacaagttgggggcagagcatttattacgtgtatgagtctcgttccacggtcagactgtctggattgggatcccagctttgcgacttgcttgccatatagccctgggaaagtagcttcatctctctgcatcttcatttttacatatgtagagtggggatgagaacccaacttccagcgtcgggttgtttcaggggttaaatcagttaagatggggaatgcacctgggatctgctccttcacacagatgccttccatctgcttgtagccctcggcacagatgcagcgataaccgccctcggtgttttcacactgcttgttctctcccggacacacctctgtctcacactcatccacatcgagacacttggagcccacctgctgatagccagggctacacttcttacagcgacctggccctgcccccatgcagcctaggcaggccttggcacagtctcggcactcataggagccctcagtgttcacgcagaattggtcagctccacagttggctccctctgtgccacactcatcaatgtctacacacttgaggtgatgcagggcccagcccttcttgcattgcaaacagtttgattcctcaggtcctgagcatcgggcacaggggccaaaacaagccgaacataccagatggctggcgttgcgttctgcctcaaagtagccaaggccacactggccacaggcctcacccccgtagccggcttggcagtcacagtgcccgctgccccctcgtgtcccttctccttcacactgcccgtagccaccgcagggcctctctgttcccccaggacaggctgtgggaagacaccaaaccaggtgaggtcatctatacaaccttgatatacaagataatattttctccc

SEQ ID NO: 1386 - DNA, 1888 bp, Homo sapiens
gcagcgacgcggtgaggagacggcccacggcgcccgcgggctggggcggtcgcttcttccttctccgtggcctacgagggtccccagcctgggtaaagatggccccatggcccccgaagggcctagtcccagctgtgctctggggcctcagcctcttcctcaacctcccaggacctatctggctccagccctctccacctccccagtcttctcccccgcctcagccccatccgtgtcatacctgccggggactggttgacagctttaacaagggcctggagagaaccatccgggacaactttggaggtggaaacactgcctgggaggaagagaatttgtccaaatacaaagacagtgagacccgcctggtagaggtgctggagggtgtgtgcagcaagtcagacttcgagtgccaccgcctgctggagctgagtgaggagctggtggagagctggtggtttcacaagcagcaggaggccccggacctcttccagtggctgtgctcagattccctgaagctctgctgccccgcaggcaccttcgggccctcctgccttccctgtcctgggggaacagagaggccctgcggtggctacgggcagtgtgaaggagaagggacacgagggggcagcgggcactgtgactgccaagccggctacgggggtgaggcctgtggccagtgtggccttggctactttgaggcagaacgcaacgccagccatctggtatgttcggcttgttttggcccctgtgcccgatgctcaggacctgaggaatcaaactgtttgcaatgcaagaagggctgggccctgcatcacctcaagtgtgtagacattgatgagtgtggcacagagggagccaactgtggagctgaccaattctgcgtgaacactgagggctcctatgagtgccgagactgtgccaaggcctgcctaggctgcatgggggcagggccaggtcgctgtaagaagtgtagccctggctatcagcaggtgggctccaagtgtctcgatgtggatgagtgtgagacagaggtgtgtccgggagagaacaagcagtgtgaaaacaccgagggcggttatcgctgcatctgtgccgagggctacaagcagatggaaggcatctgtgtgaaggagcagatcccagagtcagcaggcttcttctcagagatgacagaagacgagttggtggtgctgcagcagatgttctttggcatcatcatctgtgcactggccacgctggctgctaagggcgacttggtgttcaccgccatcttcattggggctgtggcggccatgactggctactggttgtcagagcgcagtgaccgtgtgctggagggcttcatcaagggcagataatcgcggccaccacctgtaggacctcctcccacccacgctgcccccagagcttgggctgccctcctgctggacactcaggacagcttggtttatttttgagagtggggtaagcacccctacctgccttacagagcagcccaggtacccaggcccgggcagacaaggcccctggggtaaaaagtagccctgaaggtggataccatgagctcttcacctggcggggactggcaggcttcacaatgtgtgaatttcaaaagtttttccttaatggtggctgctagagctttggcccctgcttaggattaggtggtcctcacaggggtggggccatcacagctccctcctgccagctgcatgctgccagttcctgttctgtgttcaccacatccccacaccccattgccacttatttattcatctcaggaaataaagaaaggtcttggaaagttaaaaaaaaaaaaaaaaaaaaaaaaaaaaactcgagggggggcccgtacccaatcgccctatgatgtagtcgtattaca

SEQ ID NO: 1387 - DNA, 1439 bp, Homo sapiens
aagggacaaaagctggagtccaccgcggtggcggccgctctagaactagtggatcccccgggctgcaggaattcggcacgagcctagagagggcagactatcagggtgccggcggtgagaatccagggagaggagcggaaacagaagaggggcagaagaccggggcacttgtgggttgcagagcccctcagccatgttgggagccaagccacactggctaccaggtcccctacacagtcccgggctgcccttggttctggtgcttctggccctgggggccgggtgggcccaggaggggtcagagcccgtcctgctggagggggagtgcctggtggtctgtgagcctggccgagctgctgcaggggggcccgggggagcagccctgggagaggcaccccctgggcgagtggcatttgctgcggtccgaagccaccaccatgagccagcaggggaaaccggcaatggcaccagtggggccatctacttcgaccaggtcctggtgaacgagggcggtggctttgaccgggcctctggctccttcgtagcccctgtccggggtgtctacagcttccggttccatgtggtgaaggtgtacaaccgccaaactgtccaggtgagcctgatgctgaacacgtggcctgtcatctcagcctttgccaatgatcctgacgtgacccgggaggcagccaccagctctgtgctactgcccttggaccctggggaccgagtgtctctgcgcctgcgtcgggggaatctactgggtggttggaaatactcaagtttctctggcttcctcatcttccctctctgaggacccaagtctttcaagcacaagaatccagcccctgacaactttcttctgccctctcttgccccagaaacagcagaggcaggagagagactccctctggctcctatcccacctctttgcatgggaccctgtgccaaacacccaagtttaagagaagagcagagctgagagcaggtatacagagctggaagtggaccatggaaaacatcgataaccatgcatcctcttgcttggccacctcctgaaactgctccacctttgaagtttgaactttagtccctccacactctgactgctgcctccttcctcccagctctctcactgagttatcttcactgtacctgttccagcatatccccactatctctctttctcctgatctgtgctgtcttattctcctccttaggcttcctattacctgggattccatgattcattccttcagaccctctcctgccagtatgctaaaccctccctctctctttcttatcccgctgtcccattggcccagcctggatgaatctatcaataaaacaactagagaatggtgaaaaaaaaaaaaaaaaaaaaaaaaaaaaaaactggaggggggcccggtacccaatcgcggtatatgatcgtaaaaatc

SEQ ID NO: 1388 - DNA, 688 bp, Homo sapiens
aagacatgaggcttttggattttctgtttcttcctttgtcatttttttaaagataggtttgtcgcagaatttcatctaagttatcaaaacaatttacataaatcattcacagtatcctctgtgcagtgatgtccattctcattcctgctctgggccatttgtgttttcttttccccctgatcagactagctaagagtttatcatttttacagatattttccccaaagaaacctacttttgggtccattgatttttttttttctattgttttctttttcattgacttttgctcttttcttatgaatttcctttcttctacctattttgtgttcaatttgctgtccttgttttaggttcttttgatagaggcttagatcattgatgaagaatatgaaagaatgggataatacagttaaaaacttggtctacttatgcccattagagaaaacattcttaagcacgcatggaatcttttaaaaatggacgaggtactaggacccaaagcaaatgtcagtaattcgcagatgataatgtaatgtataaatatatgatatgtaggtaaataatacaaatcacattctttggccagagtgcaactgaggaggaaatcagtaacaaaaagacaattaaatccatttgattcttttgaaaaaaaaaaaaaaaaaaaaaaaaaaaaaagggcggccgc

SEQ ID NO: 1389 - DNA, 2083 bp, Homo sapiens
ccacgcgtccgctccagtcggcgtctcagcagtctccggtgtccacgcgttgactgccgtgtgtgactccagtcggcgtctcagcagtctccggtgtccacgcgttgactgccgtgtgtgactccagtcggcgtctcagcagtctccggtgtccacgcgttgactgccgtgtgtgactccagtcggcgtcttaacagtctccggtgtccatgcgttgactgccatgtatgactccaggtattgagttcatcttcaacttctcccaacaatgaactggagttttctgtgcatgtgtctggcatgttttcctttagatctagtcctaggtgttcgatatgctattgaggactgtgtatttttatttcatttgtcacctgtgcgtggtgctttaatcctgtgccctaaactcccgccttggccatggcggtgtttctgtggactcgtggggtttccgtgtgcacacgcgtgtcctctgtctgacagtggctttgcttccccttgtcagtctgtgcctcggcttctcactgcactggcgaggtgagccggcgcttgctaatcttattcccagtctcggtgaacatgggctcagtctctcccggctcagtgttgggtttgcactggtgcacttacaggcggaagagcttcctcatttgctgagggcttttcctgaatccgtgttgaatgtggtcagctgcctttcctgcacctagtgagatgctcatgaggtcacttccttaccgcattactgtagtgaattacgctgactttcatatgccaagatgacctggcatttccaggtaagtccctgtggccatggtgcattggccttttctctgcatggccagatgagatttgctcataccgggctaaggacctcctgtgtaggaatgctcttgagggacactgggcttggatgttcattgtcttgtcatgtgatgtgtgtgtcatggtttgatattgcattaagtgggcctcctgaaacaagttctgccatagtttgtataggattggcattatttgtttcatagagatgtgatgggtgaggccatctatgcctgccattttctttttgcttaggtttttcattaagaacttgatttttaaaaatagacatgaggcctggcatggtggctcacgcttgtaatcccagcactttgggaggccaacgtggatggatcacctgaggtcaggagtttgagaccaacctagtcaacatggtgaaaccccgtctccattaaaaatataaaaattagcagggtgtggtggtgcatgcctgtaatcccagctactctggaggctgaggcaggagaatcacttgaactcaggaggtggaggttgcagtgagctgagatcacaccactgcactccagcctgggcaacagagcgaggctctgtctcaaaaaaaaagacatgaggcttttggattttctgtttcttcctttgtcatttttttaaagataggtttgtcgcagaatttcatctaagttatcaaaacaatttacataaatcattcacagtatcctctgtgcagtgatgtccattctcattcctgctctgggccatttgtgttttcttttccccccgatcagactagctaagagtttatcatttttacagatattttccccaaagaaacctacttttgggtccattgatttttttttttctattgttttctttttcattgacttttgctcttttcttatgaatttcctttcttctacctattttgtgttcaatttgctgtccttgttttaggttcttttgatagaggcttagatcattgatgaagaatatgaaagaatgggataatacagttaaaaacttggtctacttatgcccattagagaaaacattcttaagcacgcatggaatcttttaaaaatggacgaggtactaggacccaaagcaaatgtcagtaattcgcagatgataatgtaatgtataaatatatgatatgtaggtaaataatacaaatcacattctttggccagagtgcaactgaggaggaaatcagtaacaaaaagacaattaaatccatttgattcttttgaaaaaaaaaaaaaaaaaaaaaaaaaaaaaa

SEQ ID NO: 1390 - DNA, 3136 bp, Homo sapiens; identical to SEQ ID NO: 1375

SEQ ID NO: 1391 - DNA, 999 bp, Homo sapiens
  misc_feature (37)..(37): n equals a,t,g, or c
  misc_feature (941)..(941): n equals a,t,g, or c
  misc_feature (964)..(965): n equals a,t,g, or c
  misc_feature (967)..(967): n equals a,t,g, or c
  misc_feature (999)..(999): n equals a,t,g, or c
aattggtaagcaggttttcccatcaggagtgtaaaangacgccatgatttaatacgactcactatrggcgaattggtaccgggccccccytcgagttttttttttttttttttgcaaaaccatgtgtttatttttattagaaatgttcttggtataaaaacaatcatgcgctacacattgtcgtcaataaccatcaccaaacacccaggcactgaactccgtgtggtcggcaggaggggcaggcgggcaggcgggcaagacagacggcagacgggcggggcaggcgggcaagacacacggcagatgggcggggcaggcgggcaggctgcgggccacagggacacacacagaggccaccaggaggacgcagcacttggcaacacactcgagatttgttttcgttttggcttttttgtgttttgattttttttccttttttctcttttgcaacatgtaaggtttggtgaactggggaagggtggcagggagaggggascaatggctggacgagaatgaagsagaggagaacaggwwagaaaacggcagaaaatgacactggtgggacccaagaaagcaggaggagctgaggacaaagaggatgagagagagaggcggaggcaagagccagaaaggagacacagaaaaggccaagagtacaagcagccggggacgccagagagggaaaaggtgaaacaaagagataagagaacagaaagacagggctggagacagacagaggggtcgccaacagcacagacagagacgaaggagggagagatctagcactggggcccacacgacctgagcccctgtggtttggggccgggaggggcaatggtccaagacgcaggttcttgtggtagcctggcaccgccccggcccctcgtcctcctgttgctcacccggtttgcccaggctgccagcagtgatggctggggttntgctatcctcagcaccaagccanntnccgtggtgcccacggggagccaattcaaatgn

SEQ ID NO: 1392 - DNA, 3047 bp, Homo sapiens; identical to SEQ ID NO: 1376

SEQ ID NO: 1393 - DNA, 1727 bp, Homo sapiens; identical to SEQ ID NO: 1377

SEQ ID NO: 1394 - DNA, 985 bp, Homo sapiens
gaattcggcacgagccggcagcagcggaccggcgggagacggcggcttgggagctggctgtgctgcaggagctgcggcagccgccgtccttgcacctaaggaacctctgctgccagcccttcctcacttttggaaatggcgggtgaaattacagagaccggggaactctactcttcctacgttgggctggtgtacatgtttaacctcatcgtgggcacgggcgcactcaccatgcccaaggcattcgccactgccgggtggcttgtcagcctcgtcctgctggtgttcctgggcttcatgagcttcgtgaccaccacctttgtgatagaggccatggctgcagccaacgcgcagytccactggaagaggatggagaacctcaaggaggaggaagatgacgactcctccacagcctcagacagcgatgttctcatccgggacaactacgagcgggcagagaagcggcccatcctgtctgtgcgtaagtcttggggttctcgcgggcccgcacttccctccgggccacagggttccctttcttcatggagagggccctggagaggctccccgcagattctggcatttcctgcccctgggttctgaggcaggccctgtggtagactcaaaagagcacagggtttcagtcctgggcacagtcctggcccctgctggcttggccactactcagatttgcagcttggtaagttccttgacctgtgcacctcagtttccccccataccccttcctgttactgagatgattaaatgcctggttccttgcctggtgcaccctggaagctcaagtagatgtcgttctgtggcatctcttcttcctcctgccttgtgccctcatgttcatacatgcccctgccttgctgtctcctccctggtcggctgggttaggctctgacgcctgctctccctttcaccccagcaggagcatctctgaattcccttaaaaaaaaaaaaaaaaaaaaaaactcga

SEQ ID NO: 1395 - DNA, 974 bp, Homo sapiens
ggcacgagccggcagcagcggaccggcgggagacgcggcttgggagctggctgtgctgcaggagctgcggcagccgccgtccttgcacctaaggaacctctgctgccagcccttcctcacttttggaaatggcgggtgaaattacagagaccggggaactctactcttcctacgttgggctggtgtacatgtttaacctcatcgtgggcacgggcgcactcaccatgcccaaggcattcgccactgccgggtggcttgtcagcctcgtcctgctggtgttcctgggcttcatgagcttcgtgaccaccacctttgtgatagaggccatggctgcagccaacgcgcacttccactggaagaggatggagaacctcaaggaggaggaagatgacgactcctccacagcctcagacagcgatgttctcatccgggacaactacgagcgggcagagaagcggcccatcctgtctgtgcgtaagtcttggggttctcgcgggcccgcacttccctccgggccacagggttccctttcttcatggagagggccctggagaggctccccgcagattctggcatttcctgcccctgggttctgaggcaggccctgtggtagactcaaaagagcacagggtttcagtcctgggcacagtcctggcccctgctggcttggccactactcagatttgcagcttggtaagttccttgacctgtgcacctcagtttccccccataccccttcctgttactgagatgattaaatgcctggttccttgcctggtgcaccctggaagctcaagtagatgtcgttctgtggcatctcttcttcctcctgccttgtgccctcatgttcatacatgcccctgccttgctgtctcctccctggtcggctgggttaggctctgacgcctgctctccctttcaccccagcaggagcatctctgaattcccttaaaaaaaaaaaaaaaaaaaaaaaa

SEQ ID NO: 1396 - DNA, 1471 bp, Homo sapiens
tcgagtttttttttttttttttttttygcaggaaaatggkttwatyccggggctgggagttgggggtggggtgcaggcctgggkcgtggaatgtgaggrgtggacaaccctctattkyccyctctctccckttctttgtttccygaaacaaacaaacaaacaaaagtcccttcctacagtctagccaggrggagtttgggggctgggggcagactgagggagatccsagaagcagattttgaggacagccacctccagacggttgtctgcaaggccttmagtcgytgacctttcagckggcttcaggagcccggctgggagrccgrcagagsctgrtggcctgagatcagggtgacactcagttcctctccaggrcctgccacccgtccgggaagggggcactgtgccagccgcccctggggcaccggcctgccccttcccagctgggggctcggatgcttcgcggccctcagggtcctccctcggggatctggctcccctcccgccaccccagcccagtccttggattaagaagggaaaggggtggggaggcggcccaggggctgctgccccgtgcctcccagactacgtgaggggctggggccgccgtgtgcgcttggtccgacgggtgggggcggagcccacaaactcgaactgcttctgcttctcggcgtggttggggaagggcagctggccttggtagaggcgcttgatgaagtgggcctcgcgctggttctggcggctgcgggaagcctggcggggccgcccctgccgcgtgaagrccatgaaccagccctcgtgccgggcgttctggaaggccgtatagttgttctccagcacgatctccgtgaacacgcagtctttgctcttcccgctgggcttcccgatgagcttgcccctcttgttcatacagatgtacttctcactctcagcccctttgatgcgaacccggctgccaaacgtgtccgtctccactatgagcttggcaaacttgttgccgtcctcggcggtggcggagatgcgacgcccggtgacctgcacgtgcttgccactggtcctgctgtagagttggtactcgcggatctgccgcctgctcagctggtcggtcatggcgccctggtccctcacgtactggttaaaattaggagacgggtgattctccccctgagtttgacagcagagaatcagcagctgtaagcacagagtgaggttgggcagcaggcgggcggctcccatcgctggagaggttcctacagkcggttgcccccctgcccccaagctcaggagcagatgtgggaagtccccaggggtagagtcccagagaagccaaggtctctccgagccacaggttttcaggggggcgaggaggagagaaaggggaggaggaggagagaaaagagggaggaggagggggaggaggagggcgtaattgggagactgaggtatgaggtgtccactcgtgccgaattcc

SEQ ID NO: 1397 - DNA, 1001 bp, Homo sapiens
  misc_feature (30)..(30): n equals a,t,g, or c
  misc_feature (35)..(35): n equals a,t,g, or c
  misc_feature (215)..(215): n equals a,t,g, or c
atttaacggttaaagggggccttggggggnccccncccggttgttgcgctttggttccggccggggttggggccggaagcccacaaaacttsgaaacttgtttcttgctttcttcggcgttggttggggaaaggcaagcttggccyttggtagaaggcggcttgatgaagtgggcctcgcgctggttctggcgggytgcgggaagcctggcgggnccgcccctgccgcgtgaaggccatgaaccagccctcgtgccgggcgttctggaaggccgtatagttgttctccagcacgatctccgtgaacacgcagtctttgctcttcccgctgggcttcccgatgagcttgcccctcttgttcatacagatgtacttctcactctcagcccctttgatgcgaacccggctgccaaacgtgtccgtctccactatgagcttggcaaacttgttgccgtcctcggcggtggcggagatgcgacgcccggtgacctgcacgtgcttgccactggtcctgctgtagagttggtactcgcggatctgccgcctgctcagctggtcggtcatggcgccctggtccctcacgtactggttaaaattaggagacgggtgattctccccctttgcggttaccaagggaaaaatagtgtcaatttgctttgggtgacaccaccatggtccatccaagggagaggggtgaggaggtgaatatagtggggacaggccacttgtcctgcagagtgaagtgggcatatggccatagcttcccaggcccctgggtgagccggtcataacctctttgctttgcgtctaccttacagaagggactggggtctgcccaggctgggggacacttattgacagagcacagccctggaatcaggactctgggagctggaaggagccctcagggttctatcccgtcctcgtattctatgaaggaggtgcacggggcacacagctcattagggacagaacccctgtccctacctcttagaccagagc

SEQ ID NO: 1398 - DNA, 1549 bp, Homo sapiens
ttttttttttttttttttttttgcaggaaaatggttttattccggggctgggagttgggggtggggtgcaggcctgggtcgtggaatgtgaggagtggacaaccctctattttcctctctctccctttcttttttcctgaaacaaacaaacaaacaaaagtcccttcctacagtctagccaggaggagtttgggggctgggggcagactgagggagatccgagaagcagattttgaggacagccacctccagacggttgtctgcaaggccttcagtcgctgacctttcagcgggcttcaggagcccggctgggaggccggcagaggctggtggcctgagatcagggtgacactcagttcctctccagggcctgccacccgtccgggaagggggcactgtgccagccgcccctggggcaccggcctgccccttcccagctgggggctcggatgcttcgcggccctcagggtcctccctcggggatctggctcccctcccgccaccccagcccagtccttggattaagaagggaaaggggtggggaggcggcccagggctgctgccccctgcctcccagactacgtgaggggctggggccgccgtgtgcgcttggtccggcgggtgggggcggagcccacaaactcgaactgcttctgcttctcggcgtggttggggaagggcagctggccttggtagaggcgcttgatgaagtgggcctcgcgctggttctggcggctgcgggaagcctggcggggccgcccctgccgcgtgaaggccatgaaccagccctcgtgccgggcgttctggaaggccgtatagttgttctccagcacgatctccgtgaacacgcagtctttgctcttcccgctgggcttcccgatgagcttgcccctcttgttcatacagatgtacttctcactctcagcccctttgatgcgaacccggctgccaaacgtgtccgtctccactatgagcttggcaaacttgttgccgtcctcggcggtggcggagatgcgacgcccggtgacctgcacgtgcttgccactggtcctgctgtagagttggtactcgcggatctgccgcctgctcagctggtcggtcatggcgccctggtccctcacgtactggttaaaattaggagacgggtgattctccccctttgcggttaccaagggaaaaatagtgtcaatttgctttgggtgacaccaccactggtccatccaagggagaggggtgaggaggtgaatatagtggggacaggccacttgtcctgcagagtgaagtgggcatatggccatagcttcccaggcccctgggtgagccggtcataacctctttgctttgcgtctaccttacagaagggactggggtctgcccaggctgggggacacttattgacagagcacagccctggaatcaggactctgggagctggaaggagccctcagggttctatcccgtcctcgtattctatgaaggaggtgcacggggcacacagctcattagggacagaacccctgtccctacctcttagaccagagctcgtgcc

SEQ ID NO: 1399 - DNA, 1545 bp, Homo sapiens
ttttttttttttttttttttttgcaggaaaatggttttattccggggctgggagttgggggtggggtgcaggcctgggtcgtggaatgtgaggagtggacaaccctctattttcctctctctccctttcttttttcctgaaacaaacaaacaaacaaaagtcccttcctacagtctagccaggaggagtttgggggctgggggcagactgagggagatccgagaagcagattttgaggacagccacctccagacggttgtctgcaaggccttcagtcgctgacctttcagcgggcttcaggagcccggctgggaggccggcagaggctggtggcctgagatcagggtgacactcagttcctctccagggcctgccacccgtccgggaagggggcactgtgccagccgcccctggggcaccggcctgccccttcccagctgggggctcggatgcttcgcggccctcagggtcctccctcggggatctggctcccctcccgccaccccagcccagtccttggattaagaagggaaaggggtggggaggcggcccagggctgctgcccctgctcccagatacgtgaggggctggggccgccgtgtgcgcttggtccggcgggtgggggcggagcccacaaactcgaactgcttctgcttctcggcgtggttggggaagggcagctggccttggtagaggcgcttgatgaagtgggcctcgcgctggttctggcggctgcgggaagcctggcggggccgcccctgccgcgtgaaggccatgaaccagccctcgtgccgggcgttctggaaggccgtatagttgttctccagcacgatctccgtgaacacgcagtctttgctcttcccgctgggcttcccgatgagcttgcccctcttgttcatacagatgtattctcactctcagcccctttgatgcgaacccggctgccaaacgtgtccgtctccactatgagcttggcaaacttgttgccgtcctcggcggtggcggagatgcgacgcccggtgacctgcacgtgcttgccactggtcctgctgtagagttggtactcgcggatctgccgcctgctcagctggtcggtcatggcgccctggtccctcacgtactggttaaaattaggagacgggtgattctccccctttgcggttaccaagggaaaaatagtgtcaatttgctttgggtgacaccaccactggtccatccaagggagaggggtgaggaggtgaatatagtggggacaggccacttgtcctgcagagtgaagtgggcatatggccatagcttcccaggcccctgggtgagccggtcataacctctttgctttgcgtctaccttacagaagggactggggtctgcccaggctgggggacacttattgacagagcacagccctggaatcaggactctgggagctggaaggagccctcagggttctatcccgtcctcgtattctatgaaggaggtgcacggggcacacagctcattagggacagaacccctgtccctacctcttagaccagagctcgtgcc

SEQ ID NO: 1400 - DNA, 1896 bp, Homo sapiens
  misc_feature (1873)..(1873): n equals a,t,g, or c
  misc_feature (1879)..(1880): n equals a,t,g, or c
  misc_feature (1884)..(1884): n equals a,t,g, or c
ggcacgaggcgaggcgctgtcctttcagcaccacaagctcgggctgaggagggaggactcctggccgtcctcctcctcttcaaattggcttgaatctgctctgaccccccacgagtgcagcacagtctgggaagaaaggcgtaaggatggtgaagctgaacagtaaccccagcgagaagggaaccaagccgccttcagttgaggatggcttccagaccgtccctctcatcactcccttggaggttaatcacttacagctgcctgctccagaaaaggtgattgtgaagacaagaacgcaccaaaaacgtggtgtgtgctggagttgtctgaaccgatatttctttttgttccttggtattgttgattcgtcgccgagtcaggctcatgtacaaaggcatgtttcgtgttgattgttcccatgtaagatatttttaaagccactgcttattctttgttaggaaaatgtaacagcagaaaaggaaagaaacaaagaacatgaacaaaaagcattaaactggctccatcagaagacgttgaagggcagtgaagagcacagactctgtgggcttcttagataagaaaacgtagcttcagtgggggctccagggttgcagagtatgagtgacacagaccgggactattccattagcctgtggtctgcagggtaggcccgcaggaaatgaggaatggccgagctggagagaagagctgattttggcattactaagcccagaacgcacataacccatagtgaaatgtgctggcctctggtgcattttgcaagatgagcacaaactttctgggcctccatcctaggacctgggcagacccacatggcctgggctctgaatgcccaccctgcgacggtgggttctgcatcagcaaacgctgaggagtgggcagattttctttgtcttttgcttgcattttctagatccacacctggatactgcccatgttgacgagacagcagcagggggagagggagggaaggaaggtgcggctgcaagaaggaaggcacgggacaggcatgtgacactaggccacaagcgataagcacaggcacctgacttttaagtttttgtttgtttgttgtttcccaaagtgctgataacaataacaacaacaataggattccaaccaggagcctcaagtgacagccaggaagagacctgaaggttggggccaccacaatgccaaatcgtttctaaaggaagctgaaaaatgggactgtcttttgcccacttcgttgtgttaaaaggggacatttgtccaaactccccaaccgagttctagaagctcctgacaaggaggcagcatccagccttgaccaggcctcccagttccctggaaccgtatcaggcattcgcctgcctctcacaaatgtttcagggaggccagttctgcagggtgtcagctccaggacccacagggccagaaccagctgggagaattggttatttgagatgtggtactgcttcctcacaagtctcccacaggccatgtaaagggtatttttttgtggcttgctgtgttgctgagatcatcgtatgcaacagctgggtaataagactagcatagctcaaactatcctgccaaacgctctcatctgatttttcctcccttctcccccaacctccaatcaccctgagtcacctgtaaattcatttgtcattcaaagcggaataacaagttgtccctagcaaaaccgctgagcgctttataattttgtggtgtatttttgtcagtaggtagcagaggcggaagtattttttggtgtaattcttgaaattttctgacaggaaacaaataaagatagatgtgtctgagaaaaaaaaaaaaaaaaaaactcgagggggggcccgaacccaantcgacnnatantgagtcaaaaaa

SEQ ID NO: 1401 - DNA, 1099 bp, Homo sapiens
gatggagcggctgcgcttcctactgtcggatcagtcattgctgctgcttcctgagtaccatcagcgagtagaggtgggtggggcagtggttggggcaggggggctaggggacagcagtgtgtccaatgcccaccctttttcttgcaggtgctccgaaccctgggttaygtggacgaggcgggcactgtgaagctggcagggcgggtggcttgtgccatgagcagccatgagttgctcctcactgagctcatgtttgacaatgcactgagcaccctgcggcctgaggagattgctgccttgctctctggcctggtctgccagagccctggggacgctggggatcagctcccaaacaccctcaagcaggtaggggacaccacccctttctccctgccagggctgtggcattcctgaccttcaccttcaggtagtcccccaggtgaccccctccagccctgtaagtgccccaaggatggaaaatggctgccttcttgatctggtcyttccstgtcctggagcaggaaggcaggccttaacytctccttctttcctgcagggaatagaacgtgtccgggctgtggccaagcggattggtgaggtccaggtggcttgtggcctgaaccagacggtggaggaatttgtgggggagctgaattttgggctggttgaggttgtatatgagtgggcccggggcatggtgagtacctgaggtttgggattttgcagacggctggctggggagaacctgcccaggctgagtgcatccagtcctcaccctactttccccacagcccttctccgagttggcagggctctcagggacccctgagggcctggtggtccgctgcattcagcgcctggctgagatgtgtcgctcactgcggggggcagcccgcctggtaggagagcctgtgctgggtgccaagatggagacagcggctaccttgctacggcgggacatcgtatttgcggccagcctctacacccagtgaatgccccatgtaaaaacatgatgataaaacagcaaagcactgttgtgtgcttgagttgctggacagggatgactcagctaagaagacagcgagagaacctcttagaa

SEQ ID NO: 1402 - DNA, 757 bp, Homo sapiens
  misc_feature (43)..(43): n equals a,t,g, or c
  misc_feature (619)..(619): n equals a,t,g, or c
  misc_feature (646)..(646): n equals a,t,g, or c
  misc_feature (699)..(699): n equals a,t,g, or c
  misc_feature (727)..(727): n equals a,t,g, or c
  misc_feature (733)..(733): n equals a,t,g, or c
cccttctcctccagaggggcacgtagaggcagggaggggcatntggtctgggagtttcctccagcctgagggagaccatgaagtggtggggttgtagtgagggggctcccccagcctaagggagactgtgaagtggaggttgtagtaagagggcttccacagcctgagggaggcttctgggggagagaagatcttaccccagatcttaagatctgctccctcttcaggaaggatcctccccttgcagccgtgaccactgctgtccaggaactgctgcgtctggctcaggcccacccagccggacctcccaccctcgaccctgtcaatgacctgcagctcaaagatatgtcagttgtagagggtgggctccgggcccggaagctggaggagctgatccagggggctcagtgtgtacacagcccccgttttcctgcccagtacctgaagctgcgggagcgaatgcagatacagaaggagatggagcggctgcgcttcctactgtcggatcagtcattgctgctgcttcctgagtaccatcagcgagtagaggtgctccgaaccctgggttacsttggacsargcgggcacttgtsaagctggcaagggcgggttggcttgngccatgagcagccatgagttggtcctnacttgagcttatggtttgacaatgcacttgacaccctggcggcctgaggagantgctgccctttgctctctggcctggtcntgccanaacccttgggggaacgcttgggga

SEQ ID NO: 1403 - DNA, 2562 bp, Homo sapiens
tcgacccacgcgtccgggaggcttaggacccagggggcgcctttcagctgaaaaacagctcgcgctgcagcaagctagctgggaagctcccagttctaaagagaggctgtttaccagaacagcataacaagggcaggtctgactgcaaggctgggactgggaggcagagccgccgccaagggggcctcggttaaacactggtcgttcaatcacctgcaagacgaaggaggcaaggatgctgttggcctgggtacaagcattcctcgtcagcaacatgctcctagcagaagcctatggatctggaggctgtttctgggacaacggccacctgtaccgggaggaccagacctcccccgcgccgggcctccgctgcctcaactggctggacgcgcagagcgggctggcctcggcccccgtgtcgggggccggcaatcacagttactgccgaaacccggacgaggacccgcgcgggccctggtgctacgtcagtggcgaggccggcgtccctgagaaacggccttgcgaggacctgcgctgtccagagaccacctcccaggccctgccagccttcacgacagaaatccaggaagcgtctgaagggccaggtgcagatgaggtgcaggtgttcgctcctgccaacgccctgcccgctcggagtgaggcggcagctgtgcagccagtgattgggatcagccagcgggtgcggatgaactccaaggagaaaaaggacctgggaactctgggctacgtgctgggcattaccatgatggtgatcatcattgccatcggagctggcatcatcttgggctactcctacaagagggggaaggatttgaaagaacagcatgatcagaaagtatgtgagagggagatgcagcgaatcactctgcccttgtctgccttcaccaaccccacctgtgagattgtggatgagaagactgtcgtggtccacaccagccagactccagttgaccctcaggagggcagcaccccccttatgggccaggccgggactcctggggcctgagcccccccagtgggcaggagcccatgcagacactggtgcaggacagcccaccctcctacagctaggaggaactaccactttgtgttctggttaaaaccctaccactcccccscttttttggcgaatcctagtaagagtgacagaagcaggtggccctgtgggctgagggtaaggctgggtagggtcctaacagtgctccttgtccatcccttggagcagattttgtctgtggatggagacagtggcagctcccacagtgatgctgctgctaagggcttccaaacattgcctgcacccctggaactgaaccagggatagacggggagctcccccaggctcctctgtgctttactaagatggcctcagtctccactgtgggcttgagtggcatacactgttattcatggttaaggtaaagcaggtcaagggatggcattgaaaaaatatatttagtttttaaaatatttgggatggaactccctactgacctctgagaactggaaacgagtttgtacagaagtcagaactttgggttgggaatgagatctaggttgtggctgctggtatgcttcagcttgctggcaatgatgtgccttgacaaccgtgggccaggcctgggcccagggactcttcctgtttcataaggaaaggaagaattgcactgagcattccacttaggaagaggatagagaaggatctgctccgcctttggccacaggagcagaggcagacctgggatgccccagtttctcttcagggatggatagtgacctgtcttcattttgcacaggtaagagagtagttagctaacctatgggaattatactgtggggccttgtgagctgcttctaagaggctaacctggaaactaagctcagaggcaaggtaataaagcacttcagggcttgctccccaagtgggcctgatttagcaggtggtcctgcgggcgtccaggtcagcaccttcctgtagggcactggggctagggtcacagcccctaactcataaagcaatcaaagaaccattagaaagggctcattaagccttttggacacaggaccccagagaggaaaaagtgacttgcccaaggtcgtaagcaagctactggcatggcaagagcccagcttcctgacggagcgcaacatttctccactgcactgtgctagcagctcagcagggcctctaacctgtgatgtcacactcaagaggccttggcagctcctagccatagagcttcctttccagaacccttccactgcccaatgtggagacaggggttagtggggctttctatggagccatctgctttggggacctagacctcaggtggtctcttggtgttagtgatgctggagaagagaatattactggtttctacttttctataaaggcatttctctatatacatgttttatatacctcattctgacacctgcatatagtgtgggaaattgctctgcatttgacttaattaaaaaaaaaaaaagactcaaaaaaaaaaaaaaaaaaaaaaaaaaaaaaaaaaaaaaaaaaaa

SEQ ID NO: 1404 - DNA, 1186 bp, Homo sapiens
  misc_feature (2)..(2): n equals a,t,g, or c
  misc_feature (5)..(5): n equals a,t,g, or c
  misc_feature (7)..(7): n equals a,t,g, or c
  misc_feature (1185)..(1186): n equals a,t,g, or c
cntgngngtaatctgctgggcatgcccattttgaaaatcatcattgccatctccagatggcatcatcttgggctactcctacaagagggggaaggatttgaaagaacagcatgatcagaaagtatgtgagagggagatgcagcgaatcactctgcccttgtctgccttcaccaaccccacctgtgagattgtggatgagaagactgtcgtggtccacaccagccagactccagttgaccctcaggagggcagcaccccccttatgggccaggccgggactcctggggcctgagcccccccagtgggcaggagcccatgcagacactggtgcaggacagcccaccctcctacagctaggaggaactaccactttgtgttctggttaaamccctaccactcccccgcttttttggcgaatcctagtaagagtgacagaagcaggtggccctgtgggctgagggtaaggctgggtagggtcctaacagtgctccttgtccatcccttggagcagattttgtctgtggatgagacagtggcagctcccacagtgatgctgctgctaagggcttccaaacattgcctgcacccctggaactgaaccagggatagacggggagctcccccaggctcctctgtgctttactaagatggcctcagtctccactgtgggcttgagtggcatacactgttattcatggttaaggtaaagcaggtcaagggatggcattgaaaaaatatatttagtttttaaaatatttgggatggaactccctactgacctctgagaactggaaacgagtttgtacagaagtcagaactttgggttgggaatgagatctaggttgtggctgctggtatgcttcagcttgctggcaatgatgtgccttgacaaccgtgggccaggcctgggcccagggactcttcctgtttcataaggaaaggaagaattgcactgagcattccacttaggaagaggatagagaaggatctgctccgcctttggccacaggagcagaggcagacctgggatgccccagtttctcttcagggatggatagtgacctgtcttcattttgcacaggtaagagagtagttagctaacctatgggaattatactgtggggccttgtgagctgcttctaagaggctaacctggaagataatttcccgttttcccatcccccnn

SEQ ID NO: 1405 - DNA, 543 bp, Homo sapiens
  misc_feature (2)..(2): n equals a,t,g, or c
  misc_feature (22)..(22): n equals a,t,g, or c
  misc_feature (40)..(40): n equals a,t,g, or c
  misc_feature (401)..(401): n equals a,t,g, or c
tngattgtttacgatcataccnggcgttagggtaccgggncccccccgagtttttaatttttttttttatatkagaaatgcctttatagaaaagtagaaaccagtaatattctcttctccagcatcactaacaccaagagaccacctgaggtctaggtccccaaagcagatggctccatagaaagccccactaacccctgtctccacattgggcagtggaagggttctggaaaggaagctctatggctaggagctgccaaggcctcttgagtgtgacatcacaggttagaggccctgctgagctgctagcacagtgcagtggagaaatgttgcgctccgtcaggaagctgggctcttgccatgccagtagcttgcttacgaccttgggcaagtcacttttncctctctggggtcctgtgtccaaaaggcttaatgagccctttctaatggttctttgattgctttatgaattaagggctgtgacctagccccagtgccctacaggaagtgctgaactggaccccgcaggacacctgctaaatc

SEQ ID NO: 1406 - DNA, 2300 bp, Homo sapiens
cggcacgagctgggaggcagagccgccgccaagggggcctcggttaaacactggtcgttcaatcacctgcaagacgaaggaggcaaggatgctgttggcctgggtacaagcattcctcgtcagcaacatgctcctagcagaagcctatggatctggaggctgtttctgggacaacggccacctgtaccgggaggaccagacctcccccgcgccgggcctccgctgcctcaactggctggacgcgcagagcgggctggcctcggcccccgtgtcgggggccggcaatcacagttactgccgaaacccggacgaggacccgcgcgggccctggtgctacgtcagtggcgaggccggcgtccctgagaaacggccttgcgaggacctgcgctgtccagagaccacctcccaggccctgccagccttcacgacagaaatccaggaagcgtctgaagggccaggtgcagatgaggtgcaggtgttcgctcctgccaacgccctgcccgctcggagtgaggcggcagctgtgcagccagcgattgggatcagccagcgggtgcggatgaactccaaggagaaaaaggacctgggaactctgggctacgtgctgggcattaccatgatggtgatcatcattgccatcggagctggcatcatcttgggctactcctacaagagggggaaggatttgaaagaacagcatgatcagaaagtatgtgagagggagatgcagcgaatcactctgcccttgtctgccttcaccaaccccacctgtgagattgtggatgagaagactgtcgtggtccacaccagccagactccagttgaccctcaggagggcagcaccccccttatgggccaggccgggactcctggggcctgagcccccccagtgggcaggagcccatgcagacactggtgcaggacagcccaccctcctacagctaggaggaactaccactttgtgttctggttaaaaccctaccactcccccgcttttttggcgaatcctagtaagagtgacagaagcaggtggccctgtgggctgagggtaaggctgggtagggtcctaacagtgctccttgtccatcccttggagcagattttgtctgtggatggagacagtggcagctcccacagtgatgctgctgctaagggcttccaaacattgcctgcacccctggaactgaaccagggatagacggggagctcccccaggctcctctgtgctttactaagatggcctcagtctccactgtgggcttgagtggcatacactgttattcatggttaaggtaaagcaggtcaagggatggcattgaaaaaatatatttagtttttaaaatatttgggatggaactccctactgacctctgagaactggaaacgagtttgtacagaagtcagaactttgggttgggaatgagatctaggttgtggctgctggtatgcttcagcttgctggcaatgatgtgccttgacaaccgtgggccaggcctgggcccagggactcttcctgtttcataaggaaaggaagaattgcactgagcattccacttaggaagaggatagagaaggatctgctccgcctttggccacaggagcagaggcagacctgggatgccccagtttctcttcagggatggatagtgacctgtcttcattttgcacaggtaagagagtagttagctaacctatgggaattatactgtggggccttgtgagctgcttctaagaggctaacctggaaactaagctcagaggcaaggtaataaagcacttcagggcttgctccccaagtgggcctgatttagcaggtggtcctgcgggcgtccaggtcagcaccttcctgtagggcactggggctagggtcacagcccctaactcataaagcaatcaaagaaccattagaaagggctcattaagccttttggacacaggaccccagagaggaaaaagtgacttgcccaaggtcgtaagcaagctactggcatggcaagagcccagcttcctgacggagcgcaacatttctccactgcactgtgctagcagctcagcagggcctctaacctgtgatgtcacactcaagaggccttggcagctcctagccatagagcttcctttccagaacccttccactgcccaatgtggagacaggggttagtggggctttctatggagccatctgctttggggacctagacctcaggtggtctcttggtgttagtgatgctggagaagagaatattactggtttctacttttctataaaggcatttctctataaaaaaaaaaaaaaaaaa

SEQ ID NO: 1407 - DNA, 2223 bp, Homo sapiens
  misc_feature (2106)..(2106): n equals a,t,g, or c
gcgtcgactgaggagctgggtgagggagcgggaccgcacaggctctgactaccattggccctggtgcgatgacactccgccggtgggggcaacacacacgcgtcgtctcccagacattcagagcaacttctattaataccctgcctgcctgggmcccagccatgaraacwgcycctcactgaggcagagtctggtcttcctcttcttggggagacmcaraacttccagagagtgtcctggaccatgaaggtgaccaggaaagggaataggtgggtggaggccgctgcagtgaagcctmaggccccctctggtctctccagggtcatcctggatcatctgaatttccctttgaaatgagcatgcacaggttcagctgattcataatttaatacccygtggggttcatgccacagggaagctccgctgccccacagggtctgggccaggtggaagagagcagcctttttggaccactggcggtgtcctctccttcgccatctaattgaagcccatcttcccaatcaaaagcaggcgaagggccccagcttcttctaacactcactccctggccctcactggcctccctgcctctctctgcccaacttctggcattgtgcaaggtctgagacctctttggacatgaggcatgtggtcttaacctggcccttgttccagacaggtgggcagacaggtaagcagagccggtgctcccagggcaggcgagggagccatgtggtcaggcctcaggaccctgggccccaccgggagatgtgctcctgggcaaactggcagatgtaacggtttcgggttttgcagcgctggtygttccagttgaaggcagctgaagcctgcagctccacgcagttgccaaacccgtggttgtcaggctgcccaaaggcaaaactggtgaaggcctggtgctcccctgtggcccagcggaaggagtccttggcggtcttgtaggtgagcccgatccagaagttcctggtctcgaagtcactgtcartcacctcgttggtggtctccaggcggsccagatagaaggcgaggatgtcctgcactttctggctcttgatctgggccagcaccccgcctttcctctgacatttcatcctggctctgtaataggtgtctgcctctgaagacaccatgaagcagtctccgtcgatcctcaggtcacaggtgtggaagggaaaatgcaccttggtggcacactgggctcccccgtagccgatgtcacagacgcacgagcactcctcctcccggaaccggccgtgcacacactgcaggctgcacctcacttggcagtatctgcccgtgtagccagggggacagtggcagtggcaggtgctgatgttgagacgtccatggttctggcagctcatgcgacaaggattcctggggacctcacagagcccccctgcatggtcccaggctttgaagcagcctgagacactggctgtgcagagcgaacaccaggcacccttcttataggggatgattgtcttcccgttgacctcccagttgcctccgggggagtaggcacagacaaaggcttctatcgctgcctggcctgcagagcacaggtgccgcccacagcccagctggcttgaggtggcccacacgagctgcgtgtagtgggtgcaggtggcgttgcgagcacactctcctgccgcgtggctgtaccgctgcccctctgcaaaccataggctgaccacttcaacaaaggacgccaagcccgcgggcagcagctgcatgttccagcccacttgcagggtgcgccacaggccggacgccaggctcggggttgggattccacagagggctgccctggcttgagccagttgggccaggctgtcactccagtccagcctccgcatgtcagccgcagggggctggacccagctgcgcaggcggttgtgcagggagaggagcaagaaactctccttcctgttcagggctccggccatcggagcctgctcctgcagctggggtggccacacctctgcccaggcggtgccaaggagggccaggagcacagccaggagatgcccccggccaggggaggtctctggatgcagcatgggtctgttgggcccgtcaggnactccgtgcacagcctggctcagccacccggcttgtttctcaggctggatggagctattcacaatctccaggagtcaggctgggctgcacgaggaaaagggtgccttaggctctgcc

SEQ ID NO: 1408 - DNA, 1998 bp, Homo sapiens
  misc_feature (1969)..(1970): n equals a,t,g, or c
  misc_feature (1973)..(1973): n equals a,t,g, or c
caccaccagcggtggcggccgctctagaactagtggatcccccgggctgcaggaattcggcacgagctcgtgccgcgcgcgtggacacggggccctcgcccaagctgccaccgagccgcggcccccgccctcgacccttctctctcccgtattccgagctctctggaaagagaggaaactccagggaagatgtggctgaagctttttttcttgctcctctatttcctggtcctgttcgtcctggccaggttttttgaggccattgtgtggtatgaaactggcatctttgccacccagctggtggatccggtggcgctgagcttcaagaagctgaagaccattttggagtgccgggggttgggctactcagggttgcccgagaagaaggatgtccgggagctggtggaaaagtcaggtgacttgatggagggtgagctctattctgctctcaaggaagaagaagcatccgaatcggtttctagtaccaatttcagtggtgaaatgcacttctatgagcttgtggaagacacaaaagatggcatctggctggttcaggtcatagcaaatgacagaagtcccttggtgggcaaaattcactgggagaaaatggttaaaaaggtgtcaagatttggaatacgtacaggcacatttaactgttccagtgatcccagatattgcaggagaagaggctgggtccgatccacactcattatgtctgttccacaaacaagtacttcaaaagggaaagtcatgcttaaagaatacagtggacgcaagattgaagtagagcacatttttaaatggataactgctcatgcagcttctcggatcaaaaccatttataatgctgaacacttgaaagaagaatggaataaaagtgatcagtattggttaaaaatatacctatttgcaaaccttgaccagcccccagctttcttctctgcactaagtataaagtttactggaagagttgagtttatttttgttaatgtagaaaattgggacaacaagagttatatgacagatattggcatatataatatgccatcatacatacttagaactcctgaaggaatttacaggtatggaaaccacacaggcgaatttatatcccttcaggccatggattcatttttgcgctcattacaacccgaggtaaatgatctgtttgttttgagcttggttctagttaatcttatggcttggatggacttatttattacacaaggagctaccataaagcgatttgtggttctcataagcactttagggacatataattctctattaattatttcctggctacctgtgttgggctttttacagctaccttacttagatagcttttatgaatatagcttaaaattgttgagatattccaatacaaccacactggcttcatgggtaagggcagactggatgttttactcttcacacccagccctgtttctcagtacataccttggtcatggtttactaattgattactttgagaagaagagaaggcgcaacaacaacaatgatgaagtcaatgccaataacttagaatggttatcaagtctgtgggactggtacaccagctacctcttccacccgattgcttcttttcagaactttcctgtagaatctgattgggacgaagaccctgacttattcttggagcgcttagctttccctgacctttggcttcaccctctgataccaactgattatattaaaaacttaccaatgtggcgatttaaatgtcttggagtccagtctgaagaggaaatgtcggaggggtctcaagatactgaaaatgactcggaaagtgagaacacagacactttgagtagtgagaaggaagtatttgaagataagcaaagcgtacttcacaattctccaggaacagcaagtcactgtgatgctgaggcttgttcatgtgccaataaatattgtcagacsrgccctwtggmaagrtaggggaaannatncccccccatcaaaaaaaaacacgct

SEQ ID NO: 1409 - DNA, 1483 bp, Homo sapiens
tttttttttttttttttttttttttttttytggttttaaaataatttatttcataggtctgttttaatttcatgtctcacagcatacattatttaaccaagaggtgctggacagagattgtaaaaagggaggaaacatttaggataagaaaccggctcaattccattagaatttgatcctatcttgtaaagtcttgctaggataaatttctataatacttcttttgtgcttacaaaaaaacattaacttctgaatttccaatgttgtaaataaaaaaattttacaattaggtatgcattcaattaacacacaaggcaaccaaataaattctgtcatcaacattagcataatgtgtatttcccgtcactgcactaacattaaactaaacttcaaaccacaaaaacattgtgactaacattaaaaaggcaagctgtaagatactcaaagcttataaaggacaaattgcacatggttaagatgggacatcatttgacaagggctggtgttgtgcatatggctgcttttttttataagaaggccaccggcaaacagggcaacaatgtcggcccccagccaaccacatcacaatgcaattctgatgaaacacatgaccacaaggcaaccccattagcaaacatccattttcaaaattctctaggcaaacaacacattcagtacagtgcagcatatcagcaggccaagttaaccaatcaggttccatatcttcattagtgttatatgatccatatgacctccccttcctttcacatgggctggtctgacaatatttattggcacatgaacaagcctcagcatcacagtgacttgctgttcctggagaattgtgaagtacgctttgcttatcttcaaatacttccttctcactactcaaagtgtctgtgttctcactttccgagtcattttcagtatcttgagacccctccgacatttcctcttcagactggactccaagacatttaaatcgccacattggtaagtttttaatataatcagttggtatcagagggtgaagccaaaggtcagggaaagctaagcgctccaagaataagtcagggtcttcgtcccaatcagattctacaggaaagttctgaaaagaagcaatcgggtggaagaggtagctggtgtaccagtcccacagacttgataaccattctaagttattggcattgacttcatcattgktgktgktgcgccttctcttcttctcaaagtaatcaattagtaaaccatgaccaaggtatgtactgagaaacagggctgggtgtgaagagtaaaacatccagtctgcccttacccatgaagccagtgtggttgkattggaatatctyaacaattttaagctatattcataaaagctatctaagtaaggtagctgtaaaaagcccaacacaggtagccaggaaataattaatagagaattatatgtccctaaagtgcttatgagaaccacaaatcgctttat

SEQ ID NO: 1410 - DNA, 2649 bp, Homo sapiens; identical to SEQ ID NO: 165

SEQ ID NO: 1411 - DNA, 665 bp, Homo sapiens; identical to SEQ ID NO: 406

SEQ ID NO: 1412 - DNA, 707 bp, Homo sapiens
  misc_feature (668)..(668): n equals a,t,g, or c
  misc_feature (674)..(674): n equals a,t,g, or c
ggcaaagagccmycaccatcctggacacggagaagagcttccttaagtgcatgaggaaggccttccgctcaggcaagctgctgcaggtggggtacacacctgatggcaaggacgactaccggtggtgcttcagggtggacgaggtgaactggaccacctggaacaccaacgtgggcatcatcaacgaagacccgggcaactgtgagggcgtcaagcgcaccctgagcttctccctgcggtcaagcagagtttcaggcagacactggaagaactttgccctggtcccccttttaagagaggcaagtgctcgagataggcagtctgctcagcccgaggaagtttatctgcgacagttttcagggtctctraagccagaggacgctgaggtcttcaagagtcctgccgcttccggggagaagtgaggacgtcacgcagacagcactgtcaacactgggccttaggagaccccgttgccacggggggctgctgagggaacaccagtgctctgtcagcagcctggcctgggtctgtgcctgcccagcatgttcccaaatctgtgctggacaagctgtggggaagcgttcttgggaagcatgggggagtgatgttacatccaaccgtcactgtccccaagttgaatcttccttaacagatttttcaggtttttnattcantttatttaaacagttttggatgggtcagtcttt

SEQ ID NO: 1413 - DNA, 2152 bp, Homo sapiens
  misc_feature (2132)..(2132): n equals a,t,g, or c
ccgctttgttctccagatgtgaatagctccactataccagcctcgtcttccttccgggggacaacgtgggtcagggcacagagagatatttaatgtcaccctcttggggctttcatgggactccctctgccacattttttggaggttgggaaagttgctagaggcttcagaactccagcctaatggatcccaaactcgggagaatggctgcgtccctgctggctgtgctgctgctgctgctgctggagcgcggcatgttctcctcaccctccccgcccccggcgctgttagagaaagtcttccagtacattgacctccatcaggatgaatttgtgcagacgctgaaggagtgggtggccatcgagagcgactctgtccagcctgtgcctcgcttcagacaagagctcttcagaatgatggccgtggctgcggacacgctgcagcgcctgggggcccgtgtggcctcggtggacatgggtcctcagcagctgcccgatggtcagagtcttccaatacctcccgtcatcctggccgaactggggagcgatcccacgaaaggcaccgtgtgcttctacggccacttggacgtgcagcctgctgaccggggcgatgggtggctcacggacccctatgtgctgacggaggtagacgggaaactttatggacgaggagcgaccgacaacaaaggccctgtcttggcttggatcaatgctgtgagcgccttcagagccctggagcaagatcttcctgtgaatatcaaattcatcattgaggggatggaagaggctggctctgttgccctggaggaacttgtggaaaaagaaaaggaccgattcttctctggtgtggactacattgtaatttcagataacctgtggatcagccaaaggaagccagcaatcacttatggaacccgggggaacagctacttcatggtggaggtgaaatgcagagaccaggattttcactcaggaacctttggtggcatccttcatgaaccaatggctgatctggttgctcttctcggtagcctggtagactcgtctggtcatatcctggtccctggaatctatgatgaagtggttcctcttacagaagaggaaataaatacatacaaagccatccatctagacctagaagaataccggaatagcagccgggttgagaaatttctgttcgatactaaggaggagattctaatgcacctctggaggtacccatctctttctattcatgggatcgagggcgcgtttgatgagcctggaactaaaacagtcatacctggccgagttataggaaaattttcaatccgtctagtccctcacatgaatgtgtctgcggtggaaaaacaggtgacacgacatcttgaagatgtgttctccaaaagaaatagttccaacaagatggttgtttccatgactctaggactacacccgtggattgcaaatattgatgacacccagtatctcgcagcaaaaagagcgatcagaacagtgtttggaacagaaccagatatgatccgggatggatccaccattccaattgccaaaatgttccaggagatcgtccacaagagcgtggtgctaattccgctgggagctgttgatgatggagaacattcgcagaatgagaaaatcaacaggtggaactacatagagggaaccaaattatttgctgcctttttcttagagatggcccagctccattaatcacaagaaccttctagtctgatctgatccactgacagattcacctcccccacatccctagacagggatggaatgtaaatatccagagaatttgggtctagtatagtacattttcccttccatttaaaatgtcttgggatatctggatcagtaataaaatatttcaaaggcacagatgttggaaatggtttaaggtcccccactgcacaccttcctcaagtcatagctgcttgcagcaacttgatttccccaagtcctgtgcaatagccccaggattggattccttccaaccttttagcatatctccaaccttgcaatttgattggcataatcactccggtttgctttctaggtcctcaagtgctcgtgacacataatcattccatccaatgatcgcctttgctttaccaytctttccttttntcttattaataaaaatgttg

SEQ ID NO: 1414 - DNA, 1776 bp, Homo sapiens
ggcacgagattttttggaggttgggaaagttgctagaggcttcagaactccagcctaatggatcccaaactcgggagaatggctgcgtccctgctggctgtgctgctgctgctgctgctggagcgcggcatgttctcctcaccctccccgcccccggcgctgttagagaaagtcttccagtacattgacctccatcaggatgaatttgtgcagacgctgaaggagtgggtggccatcgagagcgactctgtccagcctgtgcctcgcttcagacaagagctcttcagaatgatggccgtggctgcggacacgctgcagcgcctgggggcccgtgtggcctcggtggacatgggtcctcagcagctgcccgatggtcagagtcttccaatacctcccgtcatcctggccgaactggggagcgatcccacgaaaggcaccgtgtgcttctacggccacttggacgtgcagcctgctgaccggggcgatgggtggctcacggacccctatgtgctgacggaggtagacgggaaactttatggacgaggagcgaccgacaacaaaggccctgtcttggcttggatcaatgctgtgagcgccttcagagccctggagcaagatcttcctgtgaatatcaaattcatcattgaggggatggaagaggctggctctgttgccctggaggaacttgtggaaaaagaaaaggaccgattcttctctggtgtggactacattgtaatttcagataacctgtggatcagccaaaggaagccagcaatcacttatggaacccgggggaacagctacttcatggtggaggtgaaatgcagagaccaggattttcactcaggaacctttggtggcatccttcatgaaccaatggctgatctggttgctcttctcggtagcctggtagactcgtctggtcatatcctggtccctggaatctatgatgaagtggttcctcttacagaagaggaaataaatacatacaaagccatccatctagacctagaagaataccggaatagcagccgggttgagaaatttctgttcgatactaaggaggagattctaatgcacctctggaggtacccatctctttctattcatgggatcgagggcgcgtttgatgagcctggaactaaaacagtcatacctggccgagttataggaaaattttcaatccgtctagtccctcacatgaatgtgtctgcggtggaaaaacaggtgacacgacatcttgaagatgtgttctccaaaagaaatagttccaacaagatggttgtttccatgactctaggactacacccgtggattgcaaatattgatgacacccagtatctcgcagcaaaaagagcgatcagaacagtgtttggaacagaaccagatatgatccgggatggatccaccattccaattgccaaaatgttccaggagatcgtccacaagagcgtggtgctaattccgctgggagctgttgatgatggagaacattcgcagaatgagaaaatcaacaggtggaactacatagagggaaccaaattatttgctgcctttttcttagagatggcccagctccattaatcacaagaaccttctagtctgatctgatccactgacagattcacctcccccacatccctagacagggatggaatgtaaatatccagagaatttgggtctagtatagtacattttcccttccatttaaaatgtcttgggatatctggatcagtaataaaatatttcaaaggcaaaaaaaaaaaaaaaaaaaaa

SEQ ID NO: 1415 - DNA, 2039 bp, Homo sapiens
  misc_feature (2034)..(2034): n equals a,t,g, or c
  misc_feature (2038)..(2038): n equals a,t,g, or c
ggcacaggttgctagaggcttcagaactccagcctaatggatcccaaactcgggagaatggctgcgtccctgctggctgtgctgctgctgctgctgctgcggagcgcggcatgttctcctcaccctccccgcccccggcgctgttagagaaagtcttccagtacattgacctccatcaggatgaatttgtgcagacgctgaaggagtgggtggccatcgagagcgactctgtccagcctgtgcctcgcttcagacaagagctcttcagaatgatggccgtggctgcggacacgctgcagcgcctgggggcccgtgtggcctcggtggacatgggtcctcagcaggtgctcgatggtcagagtcttccaatacctcccgtcatcctggccgaactggggagcgatcccacgaaaggcaccgtgtgcttctacggccacttggacgtgcagcctgctgaccggggcgatgggtggctcacggacccctatgtgctgacggaggtagacgggaaactttatggacgaggagcgaccgacaacaaaggccctgtcttggcttggatcaatgctgtgagcgccttcagagccctggagcaagatcttcctgtgaatatcaaattcatcattgaggggatggaaagaggctggctctgtttgccctggaggaacttgtgggaaaaagaaaaggaccgattcttctctggtgtggactacattgtaatttcagataacctgtggatcagccaaaggaagccagcaatcacttatggaacccgggggaacagctacttcatggtggaggtgaaatgcagagaccaggattttcactcaggaacctttggtggcatccttcatgaaccaatggctgatctggttgctcttctcggtagcctggtagactcgtctggtcatatcctggtccctggaatctatgatgaagtggttcctcttacagaagaggaaataaatacataccaaagccatccatctagacctaagaagaataccggaatagcagccgggttgagaaatttctgttcgatactaaggaggagattctaatgcacctctggaggtacccatctctttctattcatgggatcgagggcgcgtttgaatgagcctggaactaaaacagtcatacctggccgagttataggaaaattttcaatccgtctagtccctcacatgaatgtgtctgcggtggaaaaacaggtgacacgacatcttgaagatgtgttctccaaaagaaatagttccaacaagatggttgtttccatgactctaggactacacccgtggattgcaaatattgatgacacccagtatctcgcagcaaaaagagcgatcagaacagtgtttggaacagaaccagatatgatccgggatggatccaccattccaattgccaaaatgttccaggagatcgtccacaagagcgtggtgctaattccgctgggagctgttgatgatggagaacattcgcagaatgagaaaatcaacaggtggaactacatagagggaaccaaattatttgctgcctttttcttagagatggcccagctccattaatcacaagaaccttctagtctgatctgatccactgacagattcacctcccccacatcccctagacagggatggaatgtaaatatccagagaatttgggtctagtatagtacattttcccttccatttaaaatgtcttgggatatctggatcagtaataaaatatttcaaaggcacagatgttggaaatggtttaaggtcccccactgcacaccttcctcaagtcatagctgcttgcagcaacttgatttccccaagtcctgtgcaatagccccaggattggattccttccaaccttttagcatatctccaaccttgcaatttgattggcataatcactccggtttgctttctaggtcctcaagtgctcgtgacacataatcattccatccaatgatcgcctttgctttaccactctttcctttttcttattaataaaaatgttggtctccaaaaaaaaaaaaanaaana

SEQ ID NO: 1416 - DNA, 2039 bp, Homo sapiens; identical to SEQ ID NO: 1415
  misc_feature (2034)..(2034): n equals a,t,g, or c
  misc_feature (2038)..(2038): n equals a,t,g, or c

SEQ ID NO: 1417 - DNA, 606 bp, Homo sapiens
  misc_feature (6)..(6): n equals a,t,g, or c
  misc_feature (39)..(39): n equals a,t,g, or c
  misc_feature (114)..(114): n equals a,t,g, or c
  misc_feature (125)..(125): n equals a,t,g, or c
  misc_feature (132)..(132): n equals a,t,g, or c
  misc_feature (156)..(156): n equals a,t,g, or c
acgttntactagcatctcctgggacttaggcaacccttntcagttgtatttgatgccttcatcacggggcaggaaagaaagactggtccctcttccggatgttctccggaaccntcacggagccntgccccntggcttcagagagccgagtctatntggacatcaccacctacaaccaggacaacgagacattagaggtgcaccsacccccgaccactacatatcaggacgtcatcctaggcactcggaagacctatgccatctatgacttgcttgacaccgccatgatcaacaactctcgaaacctcaacatccagctcaagtggaagagacccccagagaatgaggcccccccagtgcccttcctgcatgcccagcggtacgtgagtggctatgggctgcagaagggggagctgagcacactgctgtacaacacccacccataccgggccttcccggtgctgctgctggacaccgtaccctggtatctgcggctgtatgtgctacacagtgtatgtcactgtgtagtggatggagtttactgtttgtggaataaaaacggctgtttccgtggttaaaaaaaaaaaaaaaaaaaaaaaactcgag

SEQ ID NO: 1418 - DNA, 2346 bp, Homo sapiens
ttaactcgcctagtagatttgcaccaatggaaccgaagaactttcatagacactcacaaggttatatccatttctttgtatctatatcaaccgtatacttttccgagactgtatacgtccatatagataggtagatatatatatatatatataaatatatatacatggatatataaagtttctttgccggcatgttgccttgtttccgcttaaattgctctattttaacttatttatgtcctaaaagaagaatgtaatttgtttacaaacctgtagataacgtctttggctatttgtatggtttaagaacactggtggctgagatgctataaaaacagctyggcccaacagacacttcccctgggttgcatcctggatgttttatgatagccatgctctgatttttgcctgctatttccgttcaataatgtcactaccgtgagaggctcaggcagaagccaaatgctaccgagttgccatcctgaggggtttaacaacatgctccgtagacgaagggagaggaggagagaaggcttcctgggtttgcaacactaacggccatccggcccaaggatgccaggatctgcaaagcactgctcgaagacttttctctcaatgaaactcgcttgagtttactaagagcatttcaaaaataggttctctttggcactgtctgtacagagattgaggtagtgttgaaatattataaatggtattgtgttgatttttttttttatttagtaacttacaggtttgtttccttattaatggcagcatctgagctgttggcatattggatgaggatcagtatggcttgctgcttttatttttatttttgaagaagaatagcctttttctctgcactatttagatccgaatgaaccttatgatgtgtatattgagatgtactcagtgtgattttaaaccaaattgtcttcctgtagtcacaatatatactgtagccttttaacagcaagtcttgctttcccaaacagaaagccattctgaaaccctacagtatcacaggtgagaaaaggtggttattttttccccaagacaacagcactagtaatcccacttaataagagcttatttaattggatgtcagcctcttaactgctaagcactttgtgggtctcagcgtttttcataaaagaacttttgtatttaatacaaagtttgctttgagacttttcagcatatgatcttttttccataaacttgtacagtgcaaaagacattttgaataccatgatcgatgatgtcccatgcttcgaggaaaaccaaacactttccgcctctcttgcaaaatccattcctcatgctgaccctcctcacgatggctgtgtcagcccagccccttcccttctccaggcccagataactcttccacaaacaagatgagagccactcgggaaaagagccatagtcaactgggagggcctacatctggatggcggtggaaaaacttgagggtttggggttcaaagtcagcccatcccacctggcaaaatcctcctggaaggaggaccttcaagagcgcatcacctgaatgtcrtgaagaagtatctctgaatgtatccaggagaggaactgcataaccaaaggggtgaccagccctcagatgtgcttattggattccagtacaaacgccaccaaagccagcccactgctctcctacaaggaaggaaagatctgctctcacagttttccatctccccacttctttgatcagtcatgtgtccgtgacctcgttccatgacatcaggatagctgtgtttgcacaccatgctgcatgttcatttggagccaggaggggttctcagtggagcctggcttagggaacagggagcgatggaagaatgccaacattagcgttggtcttctcttgtcaggaatgaaggatgcttgcacacatgcaccccctcactctcacacttgcacacatacacacacacacacacgaaatggttggtttgtcaaaactcactgtagtacataaagcttgcactctgcgtcctatatctagcagcatggggtacgtttggcagttcactccattagggggtaaataatttatgaccattcatctgtttttatgaatttttttatctagacaataattgtaaataaagaactcaccatctctgttcatttaatactatgcaatggttatgctttcaatcgctggctcttctgactcgtgcagtgtggttctgaaatgtttgtggtttaaaaaaaaaagcaaaaaacaacatcaaacagaacatagtaaatataaaaaaaaaaaaaaaaaactcgagggggggcccgtacccaatcgtccctctcatgcatgcgtattac

SEQ ID NO: 1419 - DNA, 1295 bp, Homo sapiens
ggcacgagatggcggcggctatgcccttgctctgctcgtcctgttgctcctggggcccggcggctggtgccttgcagaacccccacgcgacagcctgcgggaggaacttgtcatcaccccgctgccttccggggacgtagccgccacattccagttccgcacgcgctgggattcggagcttcagcgggaaggagtgtcccattacaggctctttcccaaagccctggggcagctgatctccaagtattctctacgggagctgcacctgtcattcacacaaggcttttggaggacccgatactgggggccacccttcctgcaggccccatcaggtgcagagctgtgggtctggttccaagacactgtcactgatgtggataaatcttggaaggagctcagtaatgtcctctcagggatcttctgcgcctctctcaacttcatcgactccaccaacacagtcactcccactgcctccttcaaacccctgggtctggccaatgacactgaccactactttctgcgctatgctgtgctgccgcgggaggtggtctgcaccgaaaacctcaccccctggaagaagctcttgccctgtagttccaaggcaggcctctctgtgctgctgaaggcagatcgcttgttccacaccagctaccactcccaggcagtgcatatccgccctgtttgcagaaatgcacgctgtactagcatctcctgggagctgaggcagaccctgtcagttgtatttgatgccttcatcacggggcagggaaagaaagactggtccctcttccggatgttctcccgaaccctcacggagccctgccccctggcttcagagagccgagtctatgtggacatcaccacctacaaccaggacaacgagacattagaggtgcacccacccccgaccactacatatcaggacgtcatcctaggcactcggaagacctatgccatctatgacttgcttgacaccgccatgatcaacaactctcgaaacctcaacatccagctcaagtggaagagacccccagagaatgaggcccccccagtgcccttcctgcatgcccagcggtacgtgagtggctatgggctgcagaagggggagctgagcacactgctgtacaacacccacccataccgggccttcccggtgctgctgctggacaccgtaccctggtatctgcggctgtatgtgctacacagtgtatgtcactgtgtagtggatggagtttactgtttgtggaataaaaacggctgtttccgtggttaaaaaaaaaaaaaaaaaaaaaaaa

SEQ ID NO: 1420 - DNA, 1483 bp, Homo sapiens
ggcacgagcgaatggagcttatgatgtgtatattgagatgtactcagtgtgattttaaaccaaattgtcttcctgtagtcacaatatatactgtagccttttaacagcaagtcttgctttcccaaacagaaagccattctgaaaccctacagtatcacaggtgagaaaaggtggttattttttccccaagacaacagcactagtaatcccacttaataagagcttatttaattggatgtcagcctcttaactgctaagcactttgtgggtctcagcgtttttcataaaagaacttttgtatttaatacaaagtttgctttgagacttttcagcatatgatcttttttccataaacttgtacagtgcaaaagacattttgaataccatgatcgatgatgtcccatgcttcgaggaaaaccaaacactttccgcctctcttgcaaaatccattcctcatgctgaccctcctcacgatggctgtgtcagcccagccccttcccttctccaggcccagataactcttccacaaacaagatgagagccactcgggaaaagagccatagtcaactgggagggcctacatctggatggcggtggaaaaacttgagggtttggggttcaaagtcagcccatcccacctggcaaaatcctcctggaaggaggaccttcaagagcgcatcacctgaatgtcatgaagaagtatctctgaatgtatccaggagaggaactgcataaccaaaggggtgaccagccctcagatgtgcttattggattccagtacaaacgccaccaaagccagcccactgctctcctacaaggaaggaaagatctgcacgtgtaaaacatggggcagccttggaacatggtgttttttggagtttcctttctcacagttttccatctccccacttctttgatcagtcatgtgtccgtgacctcgttccatgacatcaggatagctgtgtttgcacaccatgctgcatgttcatttggagccaggaggggttctcagtggagcctggcttagggaacagggagcgatggaagaatgccaacattagcgttggtcttctcttgtcaggaatgaaggatgcttgcacacatgcaccccctcactctcacacttgcacacatacacacacacacacacgaaatggttggtttgtcaaaactcactgtagtacataaagcttgcactctgcgtcctatatctagcagcatggggtacgtttggcagttcactccattagggggtaaataatttatgaccattcatctgtttttatgaatttttttatctagacaataattgtaaataaagaactcaccatctctgttcatttaatactatgcaatggttatgctttcaatcgctggctcttctgactcgtgcagtgtggttctgaaatgtttgtggtttaaaaaaaaaagcaaaaaacaacatcaaacagaacatagtaaatataaaaaaaaaaaaaaaaaa

SEQ ID NO: 1421 - DNA, 1483 bp, Homo sapiens
ttttttttttttttttttatatttactatgttctgtttgatgttgttttttgcttttttttttaaaccacaaacatttcagaaccacactgcacgagtcagaagagccagcgattgaaagcataaccattgcatagtattaaatgaacagagatggtgagttctttatttacaattattgtctagataaaaaaattcataaaaacagatgaatggtcataaattatttaccccctaatggagtgaactgccaaacgtaccccatgctgctagatataggacgcagagtgcaagctttatgtactacagtgagttttgacaaaccaaccatttcgtgtgtgtgtgtgtgtatgtgtgcaagtgtgagagtgagggggtgcatgtgtgcaagcatccttcattcctgacaagagaagaccaacgctaatgttggcattcttccatcgctccctgttccctaagccaggctccactgagaacccctcctggctccaaatgaacatgcagcatggtgtgcaaacacagctatcctgatgtcatggaacgaggtcacggacacatgactgatcaaagaagtggggagatggaaaactgtgagaaaggaaactccaaaaaacaccatgttccaaggctgccccatgttttacacgtgcagatctttccttccttgtaggagagcagtgggctggctttggtggcgtttgtactggaatccaataagcacatctgagggctggtcacccctttggttatgcagttcctctcctggatacattcagagatacttcttcatgacattcaggtgatgcgctcttgaaggtcctccttccaggaggattttgccaggtgggatgggctgactttgaaccccaaaccctcaagtttttccaccgccatccagatgtaggccctcccagttgactatggctcttttcccgagtggctctcatcttgtttgtggaagagttatctgggcctggagaagggaaggggctgggctgacacagccatcgtgaggagggtcagcatgaggaatggattttgcaagagaggcggaaagtgtttggttttcctcgaagcatgggacatcatcgatcatggtattcaaaatgtcttttgcactgtacaagtttatggaaaaaagatcatatgctgaaaagtctcaaagcaaactttgtattaaatacaaaagttcttttatgaaaaacgctgagacccacaaagtgcttagcagttaagaggctgacatccaattaaataagctcttattaagtgggattactagtgctgttgtcttggggaaaaaataaccaccttttctcacctgtgatactgtagggtttcagaatggctttctgtttgggaaagcaagacttgctgttaaaaggctacagtatatattgtgactacaggaagacaatttggtttaaaatcacactgagtacatctcaatatacacatcataagctccattcgctcgtgcc

SEQ ID NO: 1422 - DNA, 2868 bp, Homo sapiens
  misc_feature (3)..(3): n equals a,t,g, or c
  misc_feature (5)..(7): n equals a,t,g, or c
  misc_feature (2868)..(2868): n equals a,t,g, or c
ggntnnnaatgrtcgccagytctaatacgactcactatagggaaagctggtacgcctgcaggtaccggtccggaattcccgggtcgacccacgcgtccggtctcaagcaccagtcttcaccgcggaaagcatgttgtggctgttccaatcgctcctgtttgtcttctgctttggcccagggaatgtagtttcacaaagcagcttaaccccattgatggtgaacgggattctgggggagtcagtaactcttcccctggagtttcctgcaggagagaaggtcaacttcatcacttggcttttcaatgaaacatctcttgccttcatagtaccccatgaaaccaaaagtccagaaatccacgtgactaatccgaaacagggaaagcgactgaacttcacccagtcctactccctgcaactcagcaacctgaagatggaagacacaggctcttacagagcccagatatccacaaagacctctgcaaagctgtccagttacactttgaggatattaagacaactgaggaacatacaagttaccaatcacagtcagctatttcagaatatgacctgtgagctccatctgacttgctctgtggaggatgcagatgacaatgtctcattcagatgggaggccttgggaaacacactttcaagtcagccaaacctcactgtctcctgggaccccaggatttccagtgaacaggactacacctgcatagcagagaatgctgtcagtaatttatccttctctgtctctgcccagaagctttgcgaagatgttaaaattcaatatacagataccaaaatgattctgtttatggtttctgggatatgcatagtcttcggtttcatcatactgctgttacttgttttgaggaaaagaagagattccctatctttgtctactcagcgaacacagggccccgagtccgcaaggaacctagagtatgtttcagtgtctccaacgaacaacactgtgtatgcttcagtcactcattcaaacagggaaacagaaatctggacacctagagaaaatgatactatcacaatttactccacaattaatcattccaaagagagtaaacccactttttccagggcaactgcccttgacaatgtcgtgtaagttgctgaaaggcctcagaggaattcgggaatgacacgtcttctgatcccatgagacagaacaaagaacaggaagcttggttcctgttgttcctggcaacagaatttgaatatctaggataggatgatcacctccagtccttcggacttaaacctgcctacctgagtcaaacacctaaggataacatcatttccagcatgtggttcaaataatattttccaatccacttcaggccaaaacatgctaaagataacacaccagcacattgactctctctttgataactaagcaaatggaattatggttgacagagagtttatgatccagaagacaaccacttctctccttttagaaagcagcaggattgacttattgagaaataatgcagtgtgttggttacatgtgtagtctctggagttggatgggcccatcctgatacaagttgagcatcccttgtctgaaatgcttgggattagaaatgtttcagatttcaattttttttcagattttggaatatttgcattatatttagcggttgagtatccaaatccaaaaatccaaaattcaaaatgctccaataagcatttcccttgagtttcattgatgtcgatgcagtgctcaaaatctcagattttggagcattttggatattggatttttggatttgggatgctcaacttgtacaatgtttattagacacatctcctgggacatactgcctaaccttttggagccttagtctcccagactgaaaaaggaagaggatggtattacatcagctccattgtttgagccaagaatctaagtcatccctgactccagtgtctttgtcaccaggccctttggactctacctcagaaatatttcttggaccttccacttctcctccaactccttgaccaccatcctgtatccaaccatcaccacctctaacctgaatcctaccttaagatcagaacagttgtcctcacttttgttcttgtccctctccaacccactctccacaagatggccagagtaatgtttttaatataaattggatccttcagtttcctgcttaaaaccctgcaggtttcccaatgcactcagaaagaaatccagtttccatggccctggatggtctggcccacctccagcctcagctagcattacccttctgacactctctatgtagcctccctgatcttctttcagctcctctattaaaggaaaagttctttatgttaattatttacatcttcctgcaggcccttcctctgcctgctggggtcctcctattctttaggtttaattttaaatatgtcacctcctaagagaaaccttcccagaccactctttctaaaatgaatcttctaggctgggcatggtggctcacacctgtaatcccagtactttgggaggccaaggggggagatcacttgaggtcaggagttcaagaccagcctggccaacttggtgaaaccccgtctttactaaaaatacaaaaaaattagccaggcgtggtggtgcacccctaaaatcccagctacttgagagactgaggcaggagaatcacttgaacccaggaggtggaggttccagtgagccaaaatcatgccaatgtattccagtctgggtgacagagtgagactctgtctcaaaaaataaataaataaaataaaatgaaatagatcttaaaaaaaaaaaaaaaaagggcggccgctctagaggakccamgctkacgtacgcgtgcatgcgacgtn

SEQ ID NO: 1423 - DNA, 2730 bp, Homo sapiens
ccacgcgtccggtctcaagcaccagtcttcaccgcggaaagcatgttgtggctgttccaatcgctcctgtttgtcttctgctttggcccagggaatgtagtttcacaaagcagcttaaccccattgatggtgaacgggattctgggggagtcagtaactcttcccctggagtttcctgcaggagagaaggtcaacttcatcacttggcttttcaatgaaacatctcttgccttcatagtaccccatgaaaccaaaagtccagaaatccacgtgactaatccgaaacagggaaagcgactgaacttcacccagtcctactccctgcaactcagcaacctgaagatggaagacacaggctcttacagagcccagatatccacaaagacctctgcaaagctgtccagttacactttgaggatattaagacaactgaggaacatacaagttaccaatcacagtcagctatttcagaatatgacctgtgagctccatctgacttgctctgtggaggatgcagatgacaatgtctcattcagatgggaggccttgggaaacacactttcaagtcagccaaacctcactgtctcctgggaccccaggatttccagtgaacaggactacacctgcatagcagagaatgctgtcagtaatttatccttctctgtctctgcccagaagctttgcgaagatgttaaaattcaatatacagataccaaaatgattctgtttatggtttctgggatatgcatagtcttcggtttcatcatactgctgttacttgttttgaggaaaagaagagattccctatctttgtctactcagcgaacacagggccccgagtccgcaaggaacctagagtatgtttcagtgtctccaacgaacaacactgtgtatgcttcagtcactcattcaaacagggaaacagaaatctggacacctagagaaaatgatactatcacaatttactccacaattaatcattccaaagagagtaaacccactttttccagggcaactgcccttgacaatgtcgtgtaagttgctgaaaggcctcagaggaattcgggaatgacacgtcttctgatcccatgagacagaacaaagaacaggaagcttggttcctgttgttcctggcaacagaatttgaatatctaggataggatgatcacctccagtccttcggacttaaacctgcctacctgagtcaaacacctaaggataacatcatttccagcatgtggttcaaataatattttccaatccacttcaggccaaaacatgctaaagataacacaccagcacattgactctctctttgataactaagcaaatggaattatggttgacagagagtttatgatccagaagacaaccacttctctccttttagaaagcagcaggattgacttattgagaaataatgcagtgtgttggttacatgtgtagtctctggagttggatgggcccatcctgatacaagttgagcatcccttgtctgaaatgcttgggattagaaatgtttcagatttcaattttttttcagattttggaatatttgcattatatttagcggttgagtatccaaatccaaaaatccaaaattcaaaatgctccaataagcatttcccttgagtttcattgatgtcgatgcagtgctcaaaatctcagattttggagcattttggatattggatttttggatttgggatgctcaacttgtacaatgtttattagacacatctcctgggacatactgcctaaccttttggagccttagtctcccagactgaaaaaggaagaggatggtattacatcagctccattgtttgagccaagaatctaagtcatccctgactccagtgtctttgtcaccaggccctttggactctacctcagaaatatttcttggaccttccacttctcctccaactccttgaccaccatcctgtatccaaccatcaccacctctaacctgaatcctaccttaagatcagaacagttgtcctcacttttgttcttgtccctctccaacccactctccacaagatggccagagtaatgtttttaatataaattggatccttcagtttcctgcttaaaaccctgcaggtttcccaatgcactcagaaagaaatccagtttccatggccctggatggtctggcccacctccagcctcagctagcattacccttctgacactctctatgtagcctccctgatcttctttcagctcctctattaaaggaaaagttctttatgttaattatttacatcttcctgcaggcccttcctctgcctgctggggtcctcctattctttaggtttaattttaaatatgtcacctcctaagagaaaccttcccagaccactctttctaaaatgaatcttctaggctgggcatggtggctcacacctgtaatcccagtactttgggaggccaaggggggagatcacttgaggtcaggagttcaagaccagcctggccaacttggtgaaaccccgtctttactaaaaatacaaaaaaattagccaggcgtggtggtgcacccctaaaatcccagctacttgagagactgaggcaggagaatcacttgaacccaggaggtggaggttccagtgagccaaaatcatgccaatgtattccagtctgggtgacagagtgagactctgtctcaaaaaataaataaataaaataaaatgaaatagatcttaaaaaaaaaaaaaaaaa

SEQ ID NO: 1424 - DNA, 2732 bp, Homo sapiens
ccacgcgtccggtctcaagcaccagtcttcaccgcggaaagcatgttgtggctgttccaatcgctcctgtttgtcttctgctttggcccagggaatgtagtttcacaaagcagcttaaccccattgatggtgaacgggattctgggggagtcagtaactcttcccctggagtttcctgcaggagagaaggtcaacttcatcacttggcttttcaatgaaacatctcttgccttcatagtaccccatgaaaccaaaagtccagaaatccacgtgactaatccgaaacagggaaagcgactgaacttcacccagtcctactccctggcaactcagcaacctggaagatgggaagacacaggctcttacagagcccagatatccacaaagacctctgcaaagctgtccagttacactttgaggatattaagacaactgaggaacatacaagttaccagtcacagtcagctatttcagaatatgacctgtgagctccatctgacttgctctgtggaggatgcagatgacaatgtctcattcagatgggaggccttgggaaacacactttcaagtcagccaaacctcactgtctcctgggaccccaggatttccagtgaacaggactacacctgcatagcagagaatgctgtcagtaatttatccttctctgtctctgcccagaagctttgcgaagatgttaaaattcaatatacagataccaaaatgattctgtttatggtttctgggatatgcatagtcttcggtttcatcatactgctgttacttgttttgaggaagagaagagattccctatctttgtctactcagcgaacacagggccccgagtccgcaaggaacctagagtatgtttcagtgtctccaacgaacaacactgtgtatgcttcagtcactcattcaaacaggggaaacagaaatctggacacctagagaaaatgatactatcacaatttactccacaattaatcattccaaagagagtaaacccactttttccagggcaactgcccttgacaatgtcgtgtaagttgctgaaaggcctcagaggaattcgggaatgacacgtcttctgatcccatgagacagaacaaagaacaggaagcttggttcctgttgttcctggcaacagaatttgaatatctaggataggatgatcacctccagtccttcggacttaaacctgcctacctgagtcaaacacctaaggataacatcatttccagcatgtggttcagataatattttccaatccacttcaggccaaaacatgctaaagataacacaccagcacattgactctctctttgataactaagcaaatggaattatggttgacagagagtttatgatccagaagacaaccacttctctccttttagaaagcagcaggattgacttattgagaaataatgcagtgtgttggttacatgtgtagtctctggagttggatgggcccatcctgatacaagttgagcatcccttgtctgaaatgcttgggattagaaatgtttcagatttcaattttttttcagattttggaatatttgcattatatttagcggttgagtatccaaatccaaaaatccaaaattcaaaatgctccaataagcatttcccttgagtttcattgatgtcgatgcatgctcaaaatctcaattttggagcattttggatattggatttttggatttgggatgctcaacttgtacaatgtttattagacacatctcctggggacatactgcctaaccttttggagccttagtctcccagactgaaaaaggaagaggatggtattacatcagctccattgtttgagccaagaatctaagtcatccctgactccagtgtctttgtcaccaggccctttggactctacctcagaaatatttcttggaccttccacttctcctccaactccttgaccaccatcctgtatccaaccatcaccacctctaacctgaatcctaccttaagatcagaacagttgtcctcacttttgtcttgtccctctccaacccactctccacaagatggccagagtaatgtttttaatataaattggatccttcagtttcctgcttaaaaccctgcaggtttcccaatgcactcagaaagaaatccagtttccatggccctggatggtctggcccacctccagcctcagctagcattacccttctgacactctctatgtagcctccctgatcttctttcagctcctgtattaaaggaaaagttctttatgttaattatttacatcttcctgcaggcccttcctctgcctgctggggtcctcctattctttaggtttaattttaaatatgtcacctcctaagagaaaccttcccagaccactctttctaaatgaatcttctaggctgggcatggtggctcacacctgtaatcccagtactttgggaggccaaggggggagatcacttgaggtcaggagttcaagaccagcctggccaacttggtgaaaccccgtctttactaaaaatacaaaaaaattagccaggcgtggtggtgcacccctaaaatcccagctacttgagagactgaggtcaggagaatcacttgaacccaggaggtggaggttccagtgagccaaaatcatgccaatgtattccagtctgggtgacagagtgagactctgtctcaaaaaataaataaataaaataaaatgaaatagatcttaaaaaaaaaaaaaaaaa

SEQ ID NO: 1425 - DNA, 2726 bp, Homo sapiens; identical to SEQ ID NO: 169

SEQ ID NO: 1426 - DNA, 971 bp, Homo sapiens
tccggaattcccgggtcgacccacgcgtccgctaagctaagcactatatgtatatatcacattttattccttgtagcaacttccgtgaagtgaatactgtatttttatcttcatttaactgaaatatctgaagctcaaaggttaactgaattatctaagaacaagccagtatcaagaccaaaccttgtgttctgctgtactttatgactttcctttggattttgtgggggtttttttgttttgtttttatattgcagaatggactttgaatagagatttcaccttttgttattgcggaagaggagagggattgcagaggatagggttcttaatggtttttgttttacttataaaatgtgctgacatagaattttgaattccactttgacaacataggaggcaaggagaaagttttgtttttaacattttcttcagaagtagccattcagtggtactgctggcattggtgaagcctgtgggggagcctgaactttgctccattttacaggtttatgtggaacatagcactctgacccaggatttgtaatggtgactaaaaacttctcattatatcgataaaaacttcaaatttcaaatcaagactgtttattatgacagtaactagttaatcgatagacaacaaagtgaagtagaaaattcattagccccaaagcaaaagtcctgggttctatgacaggctttgtggaaccttggacaagtctcgtaactttagttccctacaaaatgagggtgttgcattgaccctcatcctctagtttctgaaatactattgactctgaatatttctaattatttttctttattgtaggattttaatataattgaggaagctcttatccgaagagtcttagaccggtcacttcttgaatatgtgaatcactcgaacaccacataattttattaaaaaaaaaaaaaaagggcggccgctctagaggatccaagcttacgta

SEQ ID NO: 1427 - DNA, 2714 bp, Homo sapiens
  misc_feature (2)..(2): n equals a,t,g, or c
cnttttttttttttttttttttttttttttttttttttttttttttttttttttttttttttttttttttgggtggtgaaggagtggatttattggagcacaaggcagtgaagcagcaaaagtgaaagtacattccacagggtgggagtgggctagagcaagtggctcaagagccctggtagcaaaatcttctggggcttaagtaccctgtagaggtttcttgatggttacaccctatgtaaatgaaagactgactcacagccaattagagactgaggtgaattggctcacagccaatccaagactggtgtggtttgactccttatgcaaatgaatgtcctggaatgaaccaatcattggccagagtgcaggtctggcccatggccaatcagaggctgatgtggtttgataccttatgcaaatgaaggtcctggaatggaccaatcacaggccagtgttcagactcttcagtgccagggagtgtgtccaagtcatccttagatccctatctctgtaccctattctcctgcctcagtcttgtgtgagattttgcaccctttgaccatcatcatcatctccccattcccccaatctctccctcaactacttctaaccactattcattaatctcttgtattatttaggtgtaaggaagaacagaaggatccaagtgtgagaaagcccaccctgagtctctcagaggtgattatgactgtgtgagcatgggtgagacaaatcctctgttgttgttgatggctacttgaagtgcttcctccattctttccattgtagaatacttagggagggagagaatattatgacaagttattgatgttgggtgatctctttcactgaaagtttcaggacagcgaaatactatttccattttctgtatgcctcttgcatgcagcctatcacgtcctgtaaggaaaaagaggaattttttcttttcatccaaggttagtttgtggaaagccttccaaaacaactgtatagtaggatgtgatttttggtatccttgctcatactttgaattctgttcaaactgtttccagtcataatcagtatttccaatgattgctgtcattagttcttcagggtagaaatgtctaagtatctccttctcacagactctataaaatcctctctgaaattcctcataaactgcttttacagagacgttgaaaatgtaatcaatatacttagaaacatagtctctcttgttggtttggtccacaggtatggagatcccatttggaattaagtcaacatcattttggtcccagtgtatagaaaagcgtatgcagagcgcatctccaatgtcatcagcagcatcatctagaacttcttgcaaactcttccccaaccgaggactgagttcttttaaatcttccaatgatggcttttggtccagaagttttttatacagagccagtgggaaaggaaggttagcaacatttaaattgaataaggagagtccacacagcattccaaagaggaaatatcttttcttctcaggtttaggcttggcaggaaaccacatgcaggaacccatttcaggatacatgaacattccatattctggcttggtcatctcttcaaacatacagtggaagaactctgaactaacccctccagactcaggacaaatttcattaataaattcaaccactaatactttgcagaagtcagtagcttcagcttgacttaattgacgcagagcatctttaaccaggcgacttcgtctgactctaagtataaatctgggtgatggaggaaattcatcctttttttgcagaattgtttcatgcataagcatgtatgctttcttttctgacatctgcatctttatatgtgaatcagcttgcaataatttaattttggatagcgaattaaagataaatggaaaatcactgaaaataacaggactgggggtttctgcaggtatcaggtggttatcccgaaagagctgtcttcctctatctatataaaagtttaataagttggagagttcatttatgttgaaagtattttctggtagtcgacagttagctttgtttaccttatgcagttctttcatcattcctaaaagagctttaacattacagtgatcctgttcggttttagtctgatgaagcagctgagagatgatggctgctttaagcatctggatcagcggattcagagaagattcttgcaaaaatgcccaacacttctttaggacttgcaaagattgtttactcatttcacacacagcctttgcaaatggaaccaccaggttcttccagttcttagaatcatgcatcacaggacattctgggagcaggaggaaaactgataaagcttcttggtgtggagaatggcatggaagagctctgagcagatcatcctcgagacacgtagttatcatggaagaaatccattccttttttgttaacttcttgaaggtatctcttgccatttmtaagtccacatcaatggaagtcgtttctccagttcctcttttctttaaaaaacttgcagtcagacaagcaggagatgaaaatatcattctaatttcacttttagccatttcatgttcagtacttcttcttttcactgctatccatttttctgccatggactggataattcggcttatttctggcagggttttcccgggagcacgtgtggaactagtatcctgatgagttgtcacaaagttggcatatgtt

SEQ ID NO: 1428 - DNA, 1931 bp, Homo sapiens
  misc_feature (26)..(26): n equals a,t,g, or c
  misc_feature (47)..(47): n equals a,t,g, or c
  misc_feature (1891)..(1891): n equals a,t,g, or c
  misc_feature (1926)..(1926): n equals a,t,g, or c
cggcgcacgagagggaacctggacanctgcaggtccggtccggaatnccgggtcgacccacgcgtccgaaaaaaggggggaggtggaacccccatggtggacatgcctggtcccaggttgccctttctattggtggagctgctggcattcccccgtgctagcttccagccttcttatctatgtttgcagcccgatattccaggctgctctttgttagaaaagaagtgatttcttggactgctttttgttagaagggaagttctgctgaggactcttttgccctcactatctgcctaaaataattttctatctctgtatcaccattcttgcaggtgggtcacatgtgttagtggcagagcaaggatgagaacccaggctccctaccttctagaccagcattctttctcttactcaagcctgtttcttttttttttttaagtagagatttgctaatttactactttttctacactgactttttctgcaccctctttcctcacttcagctggctcctaagccttttatctcatgttcctatcttcatctaattatctaagtcctatgatgttcgaatgatgccaactatctgttttatagtaatatatcatttagaaataataatggcaacaacaactgatgataataatagcagcagcagcatttactgtgtgcttattctgtgccatgcactatgctgactgctttgtatctattacctacctttttcctaacagcaaccctacgaggtaggtactattcttttttccccgtttcagacatgaggaaaaagaggcttggagcatttagtagcttgcccatgttcagacagctggtaagtatgggaaccagaatagaatccatcaggctgactccaaagcccaggctcttgagcactaagctctgtagcctcatggtataagaacttctcttggtgggaaccctaaggtttctctagggcagacttaatgacttctctcaccatctcatcccatttgtcagctcttcctgagttacacatctttcttcttgatatttttgttgctactaaggatgctggaggacaattccaacttgtccacagatccaacctatttctctataagcccaagctgcctttctaatcttctctcttaatgggaaacttttgattcagcccagtggttcagctgtctgtacaccccatgagttcacttcttcccacctgtggctttttcctgagctttgtcccctgccttgaaagctcagccaaatcctgtcttgagaaatagcctggtgtgacctctgtgaagtctctctgaccactcagcctggtgtttctctccctgctgaatcctttaagctcctaacctcattcttcctagatgagctaaataaacttccttcttgctactatcttttcatgcatataattttcccccaactacaccatgaactcattgaggacaaagaccaaatgtcatgatttttatacattcaacatggtctaggacagttctctctgcctaaggacattcaataaatacttactgaatgaagtgattaatttcttccttttcattatgttttactctttctatgaaatatcttaaccaaattttattcctttctagttttccttacaggacgtgataggctgcatgcaagaggcatacagaaaatggaaatagtatttcgctgtcctgaaactttcagtgaaagagatcacccaacatcaataacttgkcataatattctctccctycctaagtattctacaatggaaagaatggaggaagcacttyaagtagccatcaacaacaacagaggatttgtctyamccatgctcacacagtcataatcacctytgagagactcaaggtgggctttytcacacttggatccttyggtcttncttacccctaaataattccmggarattaaggaaanggggt

SEQ ID NO: 1429 - DNA, 632 bp, Homo sapiens
  misc_feature (108)..(108): n equals a,t,g, or c
cgctatacccatttttgggggcgccatgggcttctatcacaacctcgaggagggcaactcatggcgctcgtcgctttcgcgaaggcaaacccctgatcctgggyatcnwcaagcaggscctcaaatgccgagcctgtggagtgaactgccacaagcagtgcaaggatcgcctgtcagttgagtgtcggcgcagggcccagagtgtgagcctggaggggtctgcaccctcaccctcacccatgcacagccaccatcaccgcgccttcagcttctctctgccccgccctggcaggcgaggctccaggcctccagagatccgtgaggaggaggtacagacggtggaggatggggtgtttgacatccacttgtaatagatgctgtggttggatcaaggactcattcctgccttggagaaaatacttcaaccagagcagggagcctgggggtgtcggggcaggaggctggggatgggggtgggatatgagggtggcatgcagctgagggcagggccagggctggtgtccctaaggttgtacagactcttgtgaatatttgtattttccagatggaataaaaaggcccgtgtaattaaccttcaaaaaaaaaaaaaaaaaaaaaaaaaaagggcggcc

SEQ ID NO: 1430 - DNA, 833 bp, Homo sapiens
  misc_feature (701)..(701): n equals a,t,g, or c
  misc_feature (720)..(720): n equals a,t,g, or c
  misc_feature (725)..(725): n equals a,t,g, or c
  misc_feature (798)..(798): n equals a,t,g, or c
  misc_feature (802)..(802): n equals a,t,g, or c
  misc_feature (809)..(809): n equals a,t,g, or c
  misc_feature (828)..(828): n equals a,t,g, or c
ttttttttttttttttttttttttttttttttttttttttgcgcttgagtaatgccgactttatatcagcacacccagtgcccccacgttcccgctggcccaggtcccggagaccatgatggcacccacagtggacttcgcaaaggagcgtggggaccccgaaggccaggccacccctcagatgggggtcccatgctaaagcagacggtgccggtgccgcagggcgtctgagacccacggtggagcccgggcctggcgtgcgggaggcggccacgacggcgcctttctcccaggaactccgggagggaccccaggactcagcgccagggcagccttggcaggtgcagtgaggcagtgacttgtgggggttagatgtgggcctgccccacgtgggcagggatcagccaggcatgggggtccagcggatccgagcggggccacagagctctggaggacttttctgcacaatgaatttctgcttaaaaacagagatcaagaggaagctctatcctgcagctccggaaatgggtggctgcgtgcttggggtctccgccacgcgggaggacagcccagaggcaccctggtctcaggcagctggttcctaggctgtgtcctccccactggccgggcaccggctggaacggcacgaggaccagcctcactgttctcagaggggtctcgggccamtgggtgtggtggtnctggaragaagtccttgcnccgcnttttggggcctcttggaaggggcaccgggcaagccagaatcccccttgggccttttttcctaagggcaagaanccgngcaaccntttccccccattaagaatncggtg

SEQ ID NO: 1431 - DNA, 1568 bp, Homo sapiens
  misc_feature (1478)..(1478): n equals a,t,g, or c
  misc_feature (1543)..(1543): n equals a,t,g, or c
  misc_feature (1553)..(1553): n equals a,t,g, or c
tcgacccacgcgtccggcggggtgtacgaaagagaaacccggagggcgccggggactgggccggggtctgcagggctcagctgagcccatgagctcccagagctaacccctgaacacccaggcgggcaaagggctgatgtcggtagtccccatcctggaggggcaggctctgcgcatctgctcctggcatggcgctgcggcacctcgccctcctggctggccttctcgtgggagtcgccagcaagtccatggagaacacggcccagctgcccgagtgctgtgtggatgtggtgggcgtcaacgccagctgcccaggcgcaagtctgtgtggtccaggctgttacaggcgctggaacgcggacgggagcgccagctgcgtccgctgtgggaacggaaccctcccagcctacaacggctccgagtgtagaagctttgctggcccgggtgcgccattccccatgaacagaagctcagggacccccgggcggccacatcctggggctccgcgcgtggccgcctccctcttcctgggcacgttcttcattagctccggcctcatcctctccgtagctgggttcttctacctcaagcgctccagtaaactccccagggcctgctacagaagaaacaaagctccggccctgcagcctggcgaagccgctgcaatgatccccccgccacagtcctcagtacggaagccgcgctacgtcaggcgggagcggcccctggacagggccacggatcccgctgccttcccgggggaggcccgtatcagcaatgtctgacctggaggccgagaccacgccacgcacttggcggcagggacccggaggccgaccccttggcgggaaccagcacaaagtgttggcatcgcccggcgcccgggacagtcctgggcacagcctcggctctgrgtccctccgcctcccagcgacggacgccaaagggtcccgggccgcctgaggctcctccccaccacagccatctcgtttatcggaccaggagcaggcatccatgagacctcagagcttcagatcgaggccttggggggtccgggcccccccaggaaacacggtgaggccccagcgcctgcagccaaagctggcacgatctatggggcaggtgccgctctgcctagaaaagccaggggctctgctgccgtgccctccagagcccacagcgggcaggactcctccagcaccaccacacccagtggcccgagacccctctgagaacagtgaggctggtcctcgtgccgttccagccggtgcccggccagtggggaggacacagcctaggaaccagctgcctgagaccagggtgcctctgggctgtcctcccgcgtggcggagaccccaagcacgcagccacccatttccggagctgcaggatagagcttcctcttgatctctgkttttaagcagaaattcattgtgcagaaaagtcctccagagctctgtggccccgytcrgatccgntggacccccatgcctggytgatcctgcccagtggggcagcccacatytaaccccacaagtaytgnctcatgcaantgccaagttgcctgg

SEQ ID NO: 1432 - DNA, 3408 bp, Homo sapiens
  misc_feature (2492)..(2492): n equals a,t,g, or c
  misc_feature (2561)..(2561): n equals a,t,g, or c
  misc_feature (3400)..(3400): n equals a,t,g, or c
gagcaggtcagtcaggttcctgggcgctctgttacacaagcaagatacagccagccccacctaattttgtttccctggcaccctcctgctcagtgcgacattgtcacacttaacccatctgttttctctaatgcacgacagattcctttcagacaggacaactgtgatatttcagttcctgattgtaaatacctcctaagcctgaagcttctgttactagccattgtgagcttcagtttcttcatctgcaaaatgggcataatacaatctattcttgccacatcaagggattgttattcctttaaaaaaaaaccaataccaaagaagcctacaatgttggccttagccaaaattctgttgatttcaacgttgttttattcacttctatcggggagccatggaaaagaaaatcaagacataaacacaacacagaacattgcagaagtttttaaaacaatggaaaataaacctatttctttggaaagtgaagcaaacttaaactcagataaagaaaatataaccacctcaaatctcaaggcgagtcattcccctcctttgaatctacccaacaacagccacggaataacagatttctccagtaactcrtcagcagagcattctttgggcagtctaaaacccacatctaccatttccacaagccctcccttgatccatagctttgtttctaaagtgccttggaatgcacctatagcagatgaagatcttttgcccatctcagcacatcccaatgctacacctgctctgtcttcagaaaacttcacttggtctttggtcaatgacaccgtgaaaactcctgataacagttccattacagttagcatcctctcttcagaaccaacttctccatctgtgacccccttgatagtggaaccaagtggatggcttaccacaaacagtgatagcttcactgggtttaccccttatcaagaaaaaacaactctacagcctaccttaaaattcaccaataattcaaaactctttccaaatacgtcagatccccaaaaagaaaatagaaatacaggaatagtattcggggccattttaggtgctattctgggtgtctcattgcttactcttgtgggctacttgttgtgtggaaaaaggaaaacggattcattttcccatcggcgactttatgacgacagaaatgaaccagttctgcgattagacaatgcaccggaaccttatgatgtgagttttgggaattctagctactacaatccaactttgaatgattcagccatgccagaaagtgaagaaaatgcacgtgatggcattcctatggatgacatacctccacttcgtacttctgtatagaactaacagcaaaaaggcgttaaacagcaagtgtcatctacatcctagccttttgacaaattcatctttcaaaaggttacacaaaattactgtcacgtggattttgtcaaggagaatcataaaagcaggagaccagtagcagaaatgtagacaggatgtatcatccaaaggttttctttcttacaatttttggccatcctgaggcatttactaagtagccttaatttgtattttagtagtattttcttagtagaaaatatttgtggaatcagataaaactaaaagatttcaccattacagccctgcctcataactaaataataaaaattattccaccaaaaaattctaaaacaatgaagatgactctttactgctctgcctgaagccctagtaccataattcaagattgcattttcttaaatgaaaattgaaagggtgctttttaaagaaaatttgacttaaagctaaaaagaggacatagcccagagtttctgttattgggaaattgaggcaatagaaatgacagacctgtattctagtacgttataattttctagatcagcacacacatgatcagcccactgagttatgaagctgacaatgactgcattcaacggggccatggcaggaaagctgaccctacccaggaaagtaatagcttctttaaaagtcttcaaaggttttgggaattttaacttgtcttaatatatcttaggcttcaattatttgggtgccttaaaaactcaatgagaatcatggtaaaaaaaaaaagttaaccaaagaatatacctgtacataatttgtacagttttaagttgttagataggaactggatttcttatgtattagacattattgctcaatcataatggaatagattctgcatccctaaatgtatgaaccataaggttaaaaaagatgaatggaaatatcaaacaactttttactgagcatcagtttcataatcaataatataagaagattaatttggattctagtatgtttcagtttgtttttaattaccaccttcctttggtagaaaaaatatgttccttgatgtaggaaagtctaggttttagagattagaggatgagatcaagagttaaattcctaaagaagcactgaatatatgaagagagcaaacaaatcaagtnccaacctagaggctttatttttgaattgattcatggtgtgtgtgtgtgtgtgtgtgtgtgtgtgtgtancaagaaacagcttcagaaaataagggatagaaagtaatgaagaaagtacttaccccatattgccataaaaatagcaaagaagactgtccctccattatcgaacaaatatgtcacctgagtagaaaacaaacagaaatattagtcatgcaaattgattataataagccagtgaatactgtttgcactcaggtactatgattttttctcaaatagaatcatattattttatagtmcagaaatattatatatgaattcctttcatgggtcttgcaacaatttcacatgatttttctcatggggagaggtgaagaamcaacattagccctcttctctcctctcttgattccctttataccccaccatcatttctgattataaataattctaccattctatggaagtatttgtgggtcacagattgtcaaactacttaatgaaagttgtatgaaattagtttttcaggtgaggcattcctagttgcaattcctgttagcaaaacttctaggagtggggaagttggaaaatgcaggattcttccagtgagccagcatttcccatagctaaccctattctcttagtctttcaaaatgtagaatgggtccaataatggctataagatgtaataaatcccatcttaatttgttttaaaagtttcataaatcactgaacacttatgaaacaaagtgttttttaatcagatatcaactgaaacttcataaaggatgcatagttttataatgttattgaatcaaattttaaggcttgtattgtttgattttaataaagtataaattcaatttaaaaaaaaaaaaaaaaaactcgaggggggggcggtwccncatagaaa

SEQ ID NO: 1433 - DNA, 1943 bp, Homo sapiens
tcgacccacgcgtccgacgaaagagaaacccggaggcagccggggactgggccggggtctgcagggctcagctgagcccatgagctcccagagctaacccctgaacacccaggcgggcaaagggctgatgtcggtagtccccatcctggaggggcaggctctgcgcatctgctcctggcatggcgctgcggcacctcgccctcctggctggccttctcgtgggagtcgccagcaagtccatggagaacacggcccagctgcccgagtgctgtgtggatgtggtgggcgtcaacgccagctgcccaggcgcaagtctgtgtggtccaggctgttacaggcgctggaacgcggacgggagcgccactgcgtccgctgtgggaacggaaccctcccagcctacaacggctccgagtgtagaagctttgctggcccgggtgcgccattccccatgaacagaagctcagggacccccgggcggccacatcctggggctccgcgcgtggccgcctccctcttcctgggcacgttcttcattagctccggcctcatcctctccgtagctgggttcttctacctcaagcgctccagtaaactccccagggcctgctacagaagaaacaaagctccggccctgcagcctggcgaagccgctgcaatgatccccccgccacagtcctcagtacggaagccgcgctacgtcaggcgggagcggcccctggacagggccacggatcccgctgccttcccgggggaggcccgtatcagcaatgtctgacctggaggccgagaccacgccacgcacttggcggcagggacccggaggccgaccccttggcgggaaccagcacaaagtgttggcatcgcccggcgcccgggacagtcctgggcacagcctcggctctgggtccctccgcctcccagcgacggacgccaaagggtcccgggccgcctgaggctcctccccaccacagccatctcgtttatcggaccaggagcaggcatccatgagacctcagagcttcagatcgaggccttggggggtccgggcccccccaggaaacacggtgaggccccagcgcctgcagccaaagctggcacgatctatggggcaggtgccgctctgcctagaaaagccaggggctctgctgccgtgccctccagagcccacagcgggcaggactcctccagcaccaccacacccagtggcccgagacccctctgagaacagtgaggctggtcctcgtgccgttccagccggtgcccggccagtggggaggacacagcctaggaaccagctgcctgagaccagggtgcctctgggctgtcctcccgcgtggcggagaccccaagcacgcagccacccatttccggagctgcaggatagagcttcctcttgatctctgtttttaagcagaaattcattgtgcagaaaagtcctccagagctctgtggccccgctcggatccgctggacccccatgcctggctgatccctgcccacgtggggcaggcccacatctaacccccacaagtcactgcctcactgcacctgccaaggctgccctggcgctgagtcctggggtccctcccggagttcctgggagaaaggcgccgtcgtggccgcctcccgcacgccaggcccgggctccaccgtgggtctcagacgccctgcggcaccggcaccgtctgctttagcatgggacccccatctgaggggtggcctggccttcggggtccccacgctcctttgcgaagtccactgtgggtgccatcatggtctccgggacctgggccagcgggaacgtgggggcactgggtgtgctgatataaagtcggcattactcaagctgcaaaaaaaaaaaaaaaaaaaaaaaaaaaaaaaaaaaaaaaaaaaaaaaaaaaaaaaaaaaaaaaaaaaaaaaaaaaaaaaaaaaaaaaaaaaaa

SEQ ID NO: 1434 - DNA, 1064 bp, Homo sapiens
  misc_feature (532)..(532): n equals a,t,g, or c
  misc_feature (573)..(573): n equals a,t,g, or c
  misc_feature (586)..(586): n equals a,t,g, or c
  misc_feature (666)..(666): n equals a,t,g, or c
  misc_feature (672)..(672): n equals a,t,g, or c
tcgacccacgcgtccgattcccaagccttattccggttgcctcgggttgcccagttggccttggaagttcctcgactttgcacagacatgctgtttgcacctgacatgggctgtgggccattttattggcggctgaatgatgctcccagcagttcccttggtgtgttgctgtttggttgtgtgggcgaaggtgcctagacaagaaatcctgctgctggggcagtattctgccattggcasccttggcccccttggtgggacaagggttgaccagacagacagtatcttccttagctcaaggaaaagaaaagaaataggagttgctagagctgggaatggttatgcacgcctatagttccagctactcaggaggctgaggtgggaggatgccttgaaaggagttcagggtcagcctgcgtgatatagccagacctctctctaaagaagaaagaaatacggccgggtgcaggggcttacgcctgkacttcccagtgctttgggagtytkaggtkggaggatcacttcagcccangartttgagmccagtytgggcaacctggtgaamccctattncctacaaaaaatncaaaactagccgacctggtggcacacacctctagtcccagctactcgggatgtgaggtggaaggattgcttaagcctggnaggttnaggctgcagtgagtggagattgcaccactgcactccagcctgggcaacagaacaagatcctgtctcaaaaaaacaaaaaacagaccgggcgcggtggctcacacctgtaatcccagcactttgggaggccaaggcaggcggatcatgagctcaggagatcgagaccatcctggctaacacggtgaaaccgcgtctttactaaaaatacaaaaaaattagccaggtgtggtggcacctgtagtcccagctacgtgggaggctgaggcaggagaatggcatgaacccgggaggtggagcttgcagtgagccgagatcacgccattgcactccagcctgggcgacagagcgagactccgtctcaaaaaaaaaaaaaaaaaaaaaagggcggccgc

SEQ ID NO: 1435 - DNA, 940 bp, Homo sapiens
ggcccttttttttttttttttgcaaaacgaaaggcttttattgaaaaatatcaagtgccccttccagggctgccggtccctgcccagcgcgascatgggggcagcggcccgatggggctcgacggggtggtcaagtattggcggtcacccaggccccgtgctccagaagggtgaggtttcacagtccatgcaggttggtccctgggccccgaagtcgactgcccggcccgcaaagccgtggctgctggggaagctgccccagtccagcgcgggggcttcctggcttctgggggtgggctggcctccgaggcaaggctgcacgctggatggcctggtgcgcgctccagctcgcggtggtggtggtggtgttggtggtggtggtggtggtggggtctccctgcgtctgtcccttagacgtagtccttgcggtcgtagcctgtgcccaggctggctcccgggccggtggagcgcggcgcggagtagacgaccttggtggccgtgtacttcttctcgcgtgggggacacgagcagcagagcagcgcgccccccagcagctgcagcgccgcggccgcccagcccacgtacaggcccgcgcccatctcgcgcttctgcgcctcgggcaccacggggttgtagaagtcccggataatggtgttggccgaccaggacaccggcacgagggtgagcagggcggcgagaaggaacagcacgcctgccacgatggtgatcttggccttggccgtgtcgtcctgcacgcagttggtgcactgggcgcccaccagcgccactagcagcccgaaggcggccagcaggatggccaccacgatgagggcgcgggccgcctgaaggtcctgtggcagtgccagcagcgagtcgtacaccttgcactgcatctggccggtgctctgcaccacgcagttcatccacaggccctcccagc

SEQ ID NO: 1436 - DNA, 2245 bp, Homo sapiens; identical to SEQ ID NO: 168

SEQ ID NO: 1437 - DNA, 2076 bp, Homo sapiens
  misc_feature (56)..(56): n equals a,t,g, or c
tcgacccacgcgtccgtggggccgagcgccgctgggtaggcggaagtagccgcagnatggcggcggctatgccgcttgctctgctcgtcctgttgctcctggggcccggcggctggtgccttgcagaacccccacgcgacagcctgcgggaggaacttgtcatcaccccgctgccttccgcgtccgggcatggcggcggctatgccgcttgctctgctcgtcctgttgctcctggggcccggcggctggtgccttgcagaacccccacgcgacagcctgcgggaggaacttgtcatcaccccgctgccttccggggacgtagccgccacattccagttccgcacgcgctgggattcggagcttcagcgggaaggagacactgaccactactttctgcgctatgctgtgctgccgcgggaggtggtctgcaccgaaaacctcaccccctggaagaagctcttgccctgtagttccaaggcaggcctctctgtgctgctgaaggccgatcgcttgttccacaccagctaccactcccaggcagtgcatatccgccctgtttgcagaaatgcacgctgtactagcatctcctgggagctgaggcagaccctgtcagttgtatttgatgccttcatcacggggcagggaaagaaagactggtccctcttccggatgttctcccgaaccctcacggagccctgccccctggcttcagagagccgagtctatgtggacatcaccacctacaaccaggacaacgagacattagaggtgcacccacccccgaccactacatatcaggacgtcatcctaggcactcggaagacctatgccatctatgacttgcttgacaccgccatgatcaacaactctcgaaacctcaacatccagctcaagtggaagagacccccagagaatgaggcccccccagtgcccttcctgcatgcccagcggtacgtgagtggctatgggctgcagaagggggagctgagcacactgctgtacaacacccacccataccgggccttcccggtgctgctgctggacaccgtaccctggtatctgcggctgtatgtgcacaccctcaccatcacctccaagggcaaggagaacaaaccaagttacatccactaccagcctgcccaggaccggctgcaaccccacctcctggagatgctgattcagctgccggccaactcagtcaccaaggtttccatccagtttgagcgggcgctgctgaagtggaccgagtacacaccagatcctaaccatggcttctatgtcagcccatctgtcctcagcgcccttgtgcccagcatggtagcagccaagccagtggactgggaagagagtcccctcttcaacagcctgttcccagtctctgatggctctaactactttgtgcggctctacacggagccgctgctggtgaacctgccgacaccggacttcagcatgccctacaacgtgatctgcctcacgtgcactgtggtggccgtgtgctacggctccttctacaatctcctcacccgaaccttccacatcgaggagccccgcacaggtggcctggccaagcggctggccaaccttatccggcgcgcccgaggtgtccccccactctgattcttgccctttccagcagctgcagctgccgtttctctctggggaggggagcccaagggctgtttctgccacttgctctcctcagagttggcttttgaaccaaagtgccctggaccaggtcagggcctacagctgtgttgtccagtacaggagccacgagccaaatgtggcatttgaatttgaattaacttagaaattcatttcctcacctgtagtggccacctctatattgaggtgctcaataagcaaaagtggtcggtggctgctgtattggacagcacagaaaaagatttccatcaccacagaaaggtcggctgcagcactggccaaggtgatggggtgtgctacacaagtggtatgtcactgtgtagtggatggagtttactgtttgtggaataaaaacggctgtttccgtggtaaaaaaaaaaaaaaaaaaaaaaaaaaaaaaaaaaaaaa

SEQ ID NO: 1438 - DNA, 940 bp, Homo sapiens
gcaggataaggtgttccagaccctgcctgacacctgatccgaagaggttgctcatgtttgctcaggaggtgaggttcacacaataaagggcaggaggagggcttggacctggtataaaacatctggaagtttccagggggctgctttgcatctgaaactgtcagccccagaatgttgacagtcgctctcctagcccttctctgtgcctcagcctctggcaatgccattcaggccaggtcttcctcctatagtggagagtatggaagtggtggtggaaagcgattctctcattctggcaaccagttggacggccccatcaccgccctccgggtccgagtcaacacatactacatcgtaggtcttcaggtgcgctatggcaaggtgtggagcgactatgtgggtggtcgcaacggagacctggaggagatctttctgcaccctggggaatcagtgatccaggtttctgggaagtacaagtggtacctgaagaagctggtatttgtgacagacaagggccgctatctgtcttttgggaaagacagtggcacaagtttcaatgccgtccccttgcaccccaacaccgtgctccgcttcatcagtggccggtctggttctctcatcgatgccattggcctgcactgggatgtttaccccactagctgcagcagatgctgagcctcctctccttggcaggggcactgtgatgaggagtaagaactcccttatcactaacccccatccaaatggctcaataaaaaaatatggttaaggctaaaaaaaaaaaaaaaaaaaaaaaaaaaaaaaaaaaaaaaaaaaaaaaaaaaaaaaaaaaaaaaaaaaaaaaaaaaaaaaaaaaaaaaaaaaaaaaaaaaaaaaaaaaaaaaaaaaaaaaaaaaaaaaaaaaaaaaaaaaaaaaagggggggccccgcctaaaaaaaa

SEQ ID NO: 1439 - DNA, 98 bp, Homo sapiens
tctgacttgagcgtcgatttttgtgatgctcgtcagggggcggagcctatggaaaaacgccagcaacgcggcctttttacggttcctggccttttgct

SEQ ID NO: 1440 - DNA, 650 bp, Homo sapiens
ggcacgagcagaatgttgacagtcgctctcctagcccttctctgtgcctcagcctctggcaatgccattcaggccaggtcttcctcctatagtggagagtatggaggtggtggtggaaagcgattctctcattctggcaaccagttggacggccccatcaccgccctccgggtccgagtcaacacatactacatcgtaggtcttcaggtgcgctatggcaaggtgtggagcgactatgtgggtggtcgcaacggagacctggaggagatctttctgcaccctggggaatcagtgatccaggtttctgggaagtacaagtggtacctgaagaagctggtatttgtgacagacaagggccgctatctgtcttttgggaaagacagtggcacaagtttcaatgccgtccccttgcaccccaacaccgtgctccgcttcatcagtggccggtctggttctctcatcgatgccattggcctgcactgggatgtttaccccactagctgcagcagatgctgagcctcctctccttggcaggggcactgtgatgaggagtaagaactcccttatcactaacccccatccaaatggctcaataaaaaaatatggttaaggctaaaaaaaaaaaaaaaaaaaaaaaaaaaaaaaaaaaa

SEQ ID NO: 1441 - DNA, 940 bp, Homo sapiens; identical to SEQ ID NO: 1438

SEQ ID NO: 1442 - DNA, 582 bp, Homo sapiens
ggcacgagcttcatcaccattgcactcattggcactggctgggctttcattaagcacatcctttctgataaagacaaaaagatcttcatgattgtcattccactccaggtcctggcaaatgtagcctacatcatcatagagtccaccgaggagggcacgactgaatatggcttgtggaaggactctctatttctggtcgacctgttgtgttgtggtgccatcctcttcccagtggtgtggtcaatcagacatttacaagaagcatcagcaacagatggaaaagcccttttgcatctccttgactttccagtcatgcctcctaaatcagaagaaaagctgcaaagaaaatgttttgtgtggttctgggcttatttgaataatgttcatgaccacaggctgccatagcacaagtgagaatttcagaccacaagggtttaaggagcagtgctctcttctctcaaagctcagaacggtctctggatccatggtatcgtacacccagtgtggatattaacattctttaatgcaggttatgaataataaataaaacaggtttttgttaataaaaaaaaaaaaaaaaaa

SEQ ID NO: 1443 - DNA, 756 bp, Homo sapiens
  misc_feature (558)..(558): n equals a,t,g, or c
  misc_feature (565)..(565): n equals a,t,g, or c
  misc_feature (607)..(607): n equals a,t,g, or c
ctgagtcagcaagagaaaatcttgtcttagaagggccagataacacttcgctgtgagaacaggagggataatggattggagatggctatgtgtaaagcagccctgcctgctgatttaacacactttcaaaatagatgtgtcagtattcatttaaagcaagactctgatgacagaaggaaccttgaaaactacctgatattgaaatggttgtgccctttatagcccttttgcatctccttgactttccagtcatgcctcctaaatcagaagaaaagctgcaaagaaaatgttttgtgtggttctgggcttatttgaataatgttcatgaccacaggctgccatagcacaagtgagaatttcagaccacaagggtttaaggagcagtgctctcttctctcaaagctcagaacggtctctggatccatggtatcgtacacccagtgtggatattaacattctttaatgcaggttatgaataataaataaaacaggtttttgttaataaaaaaaaaaaaaaaaaactcgagggggggcccggtacccaattcgccctatagngagtcgnattacaattcactggccgtcgttttacaacgtcgtgactggnaaaaccctggcgttacccaacttaatcgccttgcagcacatccccctttcgccagctggcgtaatagcgaagaggcccgcaccgatcgcccttcccaacagttgcgcagcctgaatggcgaatggcaaattgtaagcgttaatattttg

SEQ ID NO: 1444 - DNA, 1958 bp, Homo sapiens
gcccggtgcactgtggacgatgagtcagggttaggggcgccaggacgtgggcgtgcaggacgcgggcgtgcaggacgccagagctgggtcagagctcgagccagcggcgcccggagagattcggagatgcaggcggctcggatggccgcgagcttggggcggcagctgctgaggctcgggggcggaagctcgcggctcacggcgctcctggggcagccccggcccggccctgcccggcggccctatgccgggggtgccgctcagctggctctggacaagtcagattcccacccctctgacgctctgaccaggaaaaaaccggccaaggcggaatctaagtcctttgctgtgggaatgttcaaaggccagctcaccacagatcaggtgttcccatacccgtccgtgctcaacgaagagcagacacagtttcttaaagagctggtggagcctgtgtcccgtttcttcgaggaagtgaacgatcccgccaagaatgacgctctggagatggtggaggagaccacttggcagggcctcaaggagctgggggcctttggtctgcaagtgcccagtgagctgggtggtgtgggcctttgcaacacccagtacgcccgtttggtggagatcgtgggcatgcatgaccttggcgtgggcattaccctgggggcccatcagagcatcggtttcaaaggcatcctgctctttggcacaaaggcccagaaagaaaaatacctccccaagctggcatctggggagactgtggccgctttctgtctaaccgagccctcaagcgggtcagatgcagcctccatccgaacctctgctgtgcccagcccctgtggaaaatactataccctcaatggaagcaagctttggatcagtaatgggggcctagcagacatcttcacggtctttgccaagacaccagttacagatccagccacaggagccgtgaaggagaagatcacagcttttgtggtggagaggggcttcgggggcattacccatgggccccctgagaagaagatgggcatcaaggcttcaaacacagcagaggtgttctttgatggagtacgggtgccatcggagaacgtgctgggtgaggttgggagtggcttcaaggttgccatgcacatcctcaacaatggaaggtttggcatggctgcggccctggcaggtaccatgagaggcatcattgctaaggcggtagatcatgccactaatcgtacccagtttggggagaaaattcacaactttgggctgatccaggagaagctggcacggatggttatgctgcagtatgtaactgagtccatggcttacatggtgagtgctaacatggaccagggagccacggacttccagatagaggccgccatcagcaaaatctttggctcggaggcagcctggaaggtgacagatgaatgcatccaaatcatggggggtatgggcttcatgaaggaacctggagtagagcgtgtgctccgagatcttcgcatcttccggatctttgaggggacaaatgacattcttcggctgtttgtggctctgcagggctgtatggcgggcagggctgggcagcggcctgagtctcagcggacttgtccacccggagttgagtcggagtggcgagctggcagtacgggctctggagcagtttgccactgtggtggaggccaagctgataaaacacaagaaggggattgtcaatgaacagtttctgctgcagcggctggcagacggggccatcgacctctatgccatggtggtggttctctcgagggggggcccggtacccaattcgccctatagtgagtcgtattacaattcactggccgtcgttttacaacgtcgtgactgggaaaaccctggcgttacccaacttaatcgccttgcagcacatccccctttcgccagctggcgtaatagcgaagaggcccgcaccgatcgcccttcccaac

SEQ ID NO: 1445 - DNA, 453 bp, Homo sapiens
gaattcggcacgagaaacaacatggacatgagggtccccgctcagctcctggggctcctgctactctggctccgaggtgccaggtgtgatatgcagatgacccagtctccatcctccctgtctgcatctgttggagacagagtcaccatcacttgccggacaagtcagagcattggcaaatttttaaattggtatcaacaaaaaccagggcaagcccctaagctcctgatctctggtgcatccattttgcaaactggggtcccctcaagattcagtggcagtggatctgccacatatttcactctcaccatcaatgacctacaccctgaagattctgcaacttattactgtcaacaggrttacactaccccccttttcggccaagggaccaaggttgaaatcaagcgaactgtggctgcaccatctgtcttcatcttcccgccatctgatgag

SEQ ID NO: 1446 - DNA, 941 bp, Homo sapiens; identical to SEQ ID NO: 183

SEQ ID NO: 1447 - DNA, 1391 bp, Homo sapiens
gggcgctgaggtaccggtccggaattcccgggtcgacccacgcgtccggacgcagccaggttgtcccagctttcgctctagcgccagcgcggaggacgcgatgtctgggctgtctcgcccgctgcttttggccgtcggctgcctggccgcgctctgcgtaatcacagcggctgggaacaccaccctggccccgaacgtgactacagcctcgtctccaccgcccaccaccacgacagtcccggtgtcaccgacgactctctcgccgctgccggtcaccactccagcaccagatatctgtggaagccgaaacagttgtgtttcctgtgttgatggtaatgctacctgcttttggatagaatgtaaaggtaaaagctactgttcagataattcaacagctggtgattgcaaggtggtgaacaccacaggattctgttctgctaaaaccacaactctgccttccactactacaacttccaccacagctactacatcaggtacaactaataccactctatctccaactatacaacctacgcggaagtctacctttgatgcagccagtttcattggaggaattgtccttgtcttgggtgtgcaggctgtaattttctttctctataaattctgcaaatctaaagaacgaaactaccacactctgtaaagagacccactaaattaacaaggactggcgtgtaactcactgaaaccaaaatattatctttcaagatgtcccacatggaagacgctattctaggatctttaatttttcaaaggatgcatataggagcatcacccttgaagaagaatcagttcagtcactttgctcaacgggcctatttaaagtacgctgcatgagtccttgtggctgtctttcattttacatggctgctgctgtgggattgtgttctctctgcttgacatgccaaatgtaactttaagtgatggaaaacattgtcctgcgcagacaacctcatgactcttttggcaatttaaatgtaatcattttaagcctgaaagctgcattattttcatcctaactcaggatgtagtttagtgaccagaattgagaagaatgtgccaaatgagcatcagtcaggtggatttttggctatcgtttcaaaagtggaataaatttataaatttagtacccttagagtaaaattttgtgcttgataacagttattttttttctacattagaaaaaaagatgccacacagggaattacattccagatttaaagaaatgagaggatacacaacatgaaaagtatagcaggttattgttcatacttgtaaagcaccttatatcattgagaaataaagaacagtgccttaaaaaaaaaaaaaaaawaaaaaaaaaaaaaaaaaaaaaaaaaaaaaaaaaaaaaagg

SEQ ID NO: 1448 - DNA, 557 bp, Homo sapiens
  misc_feature (530)..(530): n equals a,t,g, or c
  misc_feature (532)..(532): n equals a,t,g, or c
  misc_feature (542)..(542): n equals a,t,g, or c
  misc_feature (544)..(544): n equals a,t,g, or c
  misc_feature (551)..(551): n equals a,t,g, or c
tgcgaaagcgcagaagkggaagccgagctgggcgagaagtaggggagggcggtgctccgccgcggtggcggttgctatcgcttcgcagaacctactcaggcagccagctgagaagagttgagggaaagtgctgctgctgggtctgcagacgcgatggataacgtgcagccgaaaataaaacatcgccccttctgcttcagtgtgaaaggccacgtgaagatgctgcggctggatattatcaactcactggtaacaacagtattcatgctcatcgtatctgtgttggcactgataccagaaaccacaacattgacagttggtggaggggtgtttgcacttgtgacagcagtatgctgtcttgccgacggggcccttatttaccggaagcttctgttcaatcccagcggtccttaccagaaaaagcctgtgcatgaaaaaaaagaagttttgtaattttatattactttttagtttgatactaagtattaaacatatttctgtattcttccaaaaaaaaaaaaaaaaggggngnccgttttaangnatccaantttacg

SEQ ID NO: 1449 - DNA, 1352 bp, Homo sapiens; identical to SEQ ID NO: 184

SEQ ID NO: 1450 - DNA, 892 bp, Homo sapiens; identical to SEQ ID NO: 1194

SEQ ID NO: 1451 - DNA, 899 bp, Homo sapiens
  misc_feature (2)..(2): n equals a,t,g, or c
  misc_feature (13)..(13): n equals a,t,g, or c
antcccgggtcgnacccacgcgtccgccgcatcctagccgccgactcacacaaggcaggtgggtgaggaaatccagagttgccatggagaaaattccagtgtcagcattcttgctccttgtggccctctcctacactctggccagagataccacagtcaaacctggagccaaaaaggacacaaaggactctcgacccaaactgccccagaccctctccagaggttggggtgaccaactcatctggactcagacatatgaagaagctctatataaatccaagacaagcaacaaacccttgatgattattcatcacttggatgagtgcccacacagtcaagctttaaagaaagtgtttgctgaaaataaagaaatccagaaattggcagagcagtttgtcctcctcaatctggtttatgaaacaactgacaaacacctttctcctgatggccagtatgtccccaggattatgtttgttgacccatctctgacagttagagccgatatcactggaagatattcaaatcgtctctatgcttacgaacctgcagatacagctctgttgcttgacaacatgaagaaagctctcaagttgctgaagactgaattgtaaagaaaaaaaatctccaagcccttctgtctgtcaggccttgagacttgaaaccagaagaagtgtgagaagactggctagtgtggaagcatagtgaacacactgattaggttatggtttaatgttacaacaactattttttaagaaaaacaagttttagaaatttggtttcaagtgtacatgtgtgaaaacaatattgtatactaccatagtgagccatgattttctaaaaaaaaaaataaatgttttgggggtgttctgttttctccaaaaaaaaaaaaaaaactcgag

SEQ ID NO: 1452 - DNA, 1309 bp, Homo sapiens
gaattcggcacgagaagatataaaagctccagaaacgttgactgggaccactggagacactgaagaaggcaggggcccttagagtcttggttgccaaacagatttgcagatcaaggagaacccaggagtttcaaagaagcgctagtaaggtctctgagatccttgcactagctacatcctcagggtaggaggaagatggcttccagaagcatgcggctgctcctattgctgagctgcctggccaaaacaggagtcctgggtgatatcatcatgagacccagctgtgctcctggatggttttaccacaagtccaattgctatggttacttcaggaagctgaggaactggtctgatgccgagctcgagtgtcagtcttacggaaacggagcccacctggcatctatcctgagtttaaaggaagccagcaccatagcagagtacataagtggctatcagagaagccagccgatatggattggcctgcacgacccacagaagaggcagcagtggcagtggattgatggggccatgtatctgtacagatcctggtctggcaagtccatgggtgggaacaagcactgtgctgagatgagctccaataacaactttttaacttggagcagcaacgaatgcaacaagcgccaacacttcctgtgcaagtaccgaccatagagcaagaatcaagattctgctaactcctgcacagccccgtcctcttcctttctgctagcctggctaaatctgctcattatttcagaggggaaacctagcaaactaagagtgataagggccctactacactggcttttttaggcttagagacagaaactttagcattggcccagtagtggcttctagctctaaatgtttgccccgccatccctttccacagtatccttcttccctcctcccctgtctctggctgtctcgagcagtctagaagagtgcatctccagcctatgaaacagctgggtctttggccataagaagtaaagatttgaagacagaaggaagaaactcaggagtaagcttctagaccccttcagcttctacacccttctgccctctctccattgcctgcaccccaccccagccactcaactcctgcttgtttttcctttggccataggaaggtttaccagtagaatccttgctaggttgatgtgggccatacattcctttaataaaccattgtgtacataaaaaaaaaaaaaaaaaaaaaaaaaaaaaaaaaaaaaaaaaaaaaaaaaaaaaaaaaaaaaactcgagggggggcccgtacccaatcgcctgatcatgatcgtataca

SEQ ID NO: 1453 - DNA, 915 bp, Homo sapiens
  misc_feature (862)..(862): n equals a,t,g, or c
  misc_feature (879)..(879): n equals a,t,g, or c
  misc_feature (905)..(905): n equals a,t,g, or c
aagatataaaagctccagaaacgttgactgggaccactggagacactgaagaaggcaggggcccttagagtcttggttgccaaacagatttgcagatcaaggagaacccaggagtttcaaagaagcgctagtaaggtctctgagatccttgcactagctacatcctcagggtaggaggaagatggcttccagaagcatgcgkctgctcctattgctgagctgcctggccaaaacaggagtcctgggtgatatcatcatgagacccagctgtgctcctggatggttttaccacaagtccaattgctatggttacttcaggaagctgaggaactggtctgatgccgagctcgagtgtcagtcttacggaaacggagcccacctggcatctatcctgagtttaaaggaagccagcaccatagcagagtacataagtggctatcagagaagccagccgatatggattggcctgcacgacccacagaagaggcagcagtggcagtggattgatggggccatgtatctgtacagatcctggtctggcaagtccatgggtgggaacaagcactgtgctgagatgagctccaataacaactttttaacttggagcagcaacgaatgcaacaagcgccaacacttcctgtgcaagtaccgaccatagagcgagaatcaagattctgctaactcctgcacagccccgtcctcttcctttctgctagcctggctaaatctgctcattatttcagaggggaaacctgggcaaactaagagtgataagggccctactacactgggcttttttagggcttagagacagaaactttagcattggcccagtagtggcttctagctctgaaatgtttgnccccgccatgccctttnccacagtatccttcttgccctgcctncccctgtgct

SEQ ID NO: 1454 - DNA, 437 bp, Homo sapiens
  misc_feature (6)..(6): n equals a,t,g, or c
  misc_feature (31)..(31): n equals a,t,g, or c
  misc_feature (436)..(436): n equals a,t,g, or c
aaatanagagaagcagccgatatggattggnctgcacgacccacagaaggtaacctcagacttggccacaaaggccctcttgggaaagccaggctggcatcctctttggggggaatggcctcccggcctataacaaggacacagcgggtggatcttctccagatgtgcctccagctgacggagaccaaagtctcaaggtcaggggcccagttctggccctcggtggagggtatgatttaaatgactccattgtatagacctttgtctaattaaggccctcctgaatggcagaacacaaaattaccagctttctagagccttaaaaagtgtgtgtgtgtgtgtgtgtgtgtgtgtacgcacacaggyctattatgagacagattaatcraatctccattggatcttgagttaagttgaaaacttccagctagccttnc

SEQ ID NO: 1455 - DNA, 225 bp, Homo sapiens
  misc_feature (216)..(216): n equals a,t,g, or c
ctaaggaagtcccctcagtcccctttaaaacryggttttcattgcaaacattgggaaagtacagaaatgcttaaagaaggaaaaagagaaagtcattccactcaaccgctaataggaaaacattrccaatattactgcaaaaaatagaaatagatgtaaatatttactccatctgaatgacagggttctgattgatagcaatgtgaatacataaanatgtaaaat

SEQ ID NO: 1456 - DNA, 1723 bp, Homo sapiens
gcacgtgccgcagcgtgggcaccagctacaaatgcctctgtgatccaggttaccatggcctctactgtgaggaggaatataatgagtgcctctccgctccatgcctgaatgcagccacctgcagggacctcgttaatggctatgagtgtgtgtgcctggcagaatacaaaggaacacactgtgaattgtacaaggatccctgcgctaacgtcagctgtctgaacggagccacctgtgacagcgacggcctgaatggcacgtgcatctgtgcacccgggtttacaggtgaagagtgcgacattgacataaatgaatgtgacagtaacccctgccaccatggtgggagctgcctggaccagcccaatggttataactsccactgcccgcatggttgggtgggagcaaactgtgagatccacctccaatggaagtccgggcacatggcggagagcctcaccaacatgccacggcactccctctacatcatcattggagccctctgcgtggccttcatccttatgctgatcatcctgatcgtggggatttgccgcatcagccgcattgaataccagggttcttccaggccagcctatraggagttctacaactgccgcagcatcgacagcgagttcagcaatgccattgcatccatccggcatgccaggtttggaaagaaatcccggcctgcaatgtatgatgtgagccccatcgcctatgaagattacagtcctgatgacaaacccttggtcacactgattaaaactaaagatttgtaatctttttttggattatttttcaaaaagatgagatactacactcatttaaatatttttaagaaaataaaaagcttaagaaatttaaaatgctagctgctcaagagttttcagtagaatatttaagaactaattttctgcagcttttagtttggaaaaaatattttaaaaacaaaatttgtgaaacctatagacgatgttttaatgtaccttcagctctctaaactgtgtgcttctactagtgtgtgctcttttcactgtagacactatcacgagacccagattaatttctgtggttgttacagaataagtctaatcaaggagaagtttctgtttgacgtttgagtgccggctttctgagtagagttaggaaaaccacgtaacgtagcatatgatgtataatagagtatacccgttacttaaaaagaagtctgaaatgttcgttttgtggaaaagaaactagttaaatttactattcctaacccgaatgaaattagcctttgccttattctgtgcatgggtaagtaacttatttctgcactgttttgttgaactttgtggaaacattctttcgagtttgtttttgtcattttcgtaacagtcgtcgaactaggcctcaaaaacatacgtaacgaaaaggcctagcgaggcaaattctgattgatttgaatctatatttttctttaaaaagtcaagggttctatattgtgagtaaattaaatttacatttgagttgtttgttgctaagaggtagtaaatgtaagagagtactggttccttcagtagtgagtatttctcatagtgcagctttatttatctccaggatgtttttgtggctgtatttgattgatatgtgcttcttctgattcttgctaatttccaaccatattgaataaatgtgatcaagtcaaaaaaaaaaaaaaaaaaaaaaactcgagggggggtcccgt

SEQ ID NO: 1457 - DNA, 1361 bp, Homo sapiens
ggcacgaggggagctgcctggaccagcccaatggttataactcccactgcccgcatggttgggtgggagcaaactgtgagatccacctccaatggaagtccgggcacatggcggagagcctcaccaacatgccacggcactccctctacatcatcattggagccctctgcgtggccttcatccttatgctgatcatcctgatcgtggggatttgccgcatcagccgcattgaataccagggttcttccaggccagcctataaggagttctacaactgccgcagcatcgacagcgagttcagcaatgccattgcatccatccggcatgccaggtttggaaagaaatcccggcctgcaatgtatgatgtgagccccatcgcctatgaagattacagtcctgatgacaaacccttggtcacactgattaaaactaaagatttgtaatctttttttggattatttttcaaaaagatgagatactacactcatttaaatatttttaagaaaataaaaagcttaagaaatttaaaatgctagctgctcaagagttttcagtagaatatttaagaactaattttctgcagcttttagtttggaaaaaatattttaaaaacaaaatttgtgaaacctatagacgatgttttaatgtaccttcagctctctaaactgtgtgcttctactagtgtgtgctcttttcactgtagacactatcacgagacccagattaatttccgtggttgttacagaataagtctaatcaaggagaagtttctgtttgacgtttgagtgccggctttctgagtagagttaggaaaaccacgtaacgtagcatatgatgtataataggagtatacccgttacttaaaaagaagtctgaaatgttcgttttgtggaaaagaaactagttaaatttactattcctaacccgaatgaaattagcctttgccttattctgtgcatgggtaagtaacttatttctgcactgttttgttgaactttgtggaaacattctttcgagtttgtttttgtcattttcgtaacagtcgtcgaactaggcctcaaaaacatacgtaacgaaaaggcctagcgaggcaaattctggattgatttgaatctatatttttctttaaaaagtcaagggttctatattgtaagtaaattaaatttacatttgagttgtttgttgctaagaggtagtaaatgtaagagagtactggttccttcagtagtgagtatttctcatagtgcagctttatttatctccaggatgtttttgtggctgtatttgattgatatgtgcttcttctgattcttgctaatttccaaccatattgaataaatgtgatcaagtcaaaaaaaaaa

SEQ ID NO: 1458 - DNA, 2794 bp, Homo sapiens
  misc_feature (2740)..(2740): n equals a,t,g, or c
  misc_feature (2750)..(2750): n equals a,t,g, or c
  misc_feature (2768)..(2768): n equals a,t,g, or c
  misc_feature (2779)..(2779): n equals a,t,g, or c
cgccagttctaatacgactcactatagggaaagctggtacgcctgcaggtaccggtccggaattcccgggtcgacccacgcgtccgcggackcgtgggtggggcatcaatctcctcatctcgctgacatttttgactgtaactgatcttattggcctgccatgggtgtgctttatatatacaatcatgagtctagcatccctgctttttgttgttatgtttatacctgagacaaagggatgctctttggaacaaatatcaatggagctagcaaaagtgaactatgtgaaaaacaacatttgttttatgagtcatcaccaagaagaattagtgccaaaacagcctcaaaaaagaaaaccccaggagcagctcttggagtgtaacaagctgtgtggtaggggccaatccaggcagctttctccagagacctaatggcctcaacaccttctgaacgtggatagtgccagaacacttaggagggtgtctttggaccaatgcatagttgcgactcctgtgctctcttttcagtgtcatggaactggttttgaagagacactctgaaatgataaagacagcctttaatccccctcctccccagaaggaacctcaaaaggtagatgaggtacaaggtcctaagtgatctctttttctgagcaggatatcaggttaaaaaaaaaaagttactggctggtttaatactttctaccttcttcacagagcagcctttgaatagactatgtcctagtgaagacatcaacctccgccttaagctatgtatgtatggaggccagtcgcagctttattatgcagacacacaagtggtctggacatgagggtacagtttctgcctaccaagacactacttgcactggatcttacgcaaaaaagaaccagaacacacagtgtggacaactgcccatatattctatctagattaggagagggtcctggctaggattttagtggtaattcctagttacattcaacaagtataaagattatagagcttattttatgaactataaactataatttaatgcaaaatatccttttatgaatttcatgttaatattgtgaaatattaaaataattccgcaatagttgagaaaaatgagcatttttttccatttttaaaaaatgcatagaaaagacaattttaaaatcctgggaccatatttatttagaagtagctgttagtaaaacattagaaaaggagtcaggccattaggttatttatccaaatctctaagcaattaggttgaagttattaagtcaagcctagaaaagctgcctccttgtaaggctttcatgacaatgtatagtaatccacagtgtccaattcttcacactcctcaggaatatcactacctcaggttacggtacacaggctataattgatgatgatgttcagataactgaagacacaataaatgacattcagacatcaggacaattccctcatgttcttttctatgatggccacctgtaccagcaacgtgggtttcacccacacaacgatgaactgttctcttacttctccagttgattttaaagacttgttaagaggtcttactaataaaatttgggtatgatagaaaatccacaatcaaatcttgaaccaaataacatattaaattactaatatttaagtgatggaagacacacaaaaaacttaaaagcacgaacaacctaacttgaaaaagaattttaaaatatgattaacctgaagaaaagagaatcctaagagccaaagctcctttttatttagcttggaattttcctattggttcctaacaaactgtcccaatgtcatataaggaaacatgatctattacattcctttatacaatgtggagagactataaacctatgtaagtagtaaaactatatyagagactcaggagactgactaaaaggcctggatctgcagtgtattatctgtataaaaattggcagggggaagctwaaaggaaaggagattggagatctcaattctatcatggtgtatttcatacgcaaatcagagcatgcattgttttttgtttttggaaagagaagggaagtgtgttctgccccatgtttccttccgtgtttatagttcaaactctatatatacttcaggtattttttgtttagcccttcattataaatgggcaggaaattgtttatcaacctagccagtttattactagtgaccttgacttcagtatcttgagcattcttttatatttttcttttattatcctgagtctgtaactaaacaattttgtcttcaaatttttatccaatatccattgcaccacaccaaatcaagcttcttgattttcaaaaataaaaagggggaaatacttacaacttgtacatatatattcacagtttttatttataaaaaaaatttacagtacttatggagagccagcagaagacatcagagcactcacttcttcccatctttgttaaggttagcgaattacccatggacactgttaggtgaggctcattcggcagccctgaaaacaaacctggtcacactgtctttaccctctcccttcagataaagcacttcgattatctattgatctgcccagttttcaagtcatgcggaatacttaaaaaggggtacaycatctgggatctgkaccttgggctaatataagccatggtttcccccctatyccaatggtttcctttttttggggtgaacattgggaaaccaggggggtgggctttattactgggtnaattaaaccnaatgggaatggccaggcnttaaaacaggngcctggtacccttcc

SEQ ID NO: 1459 - DNA, 2359 bp, Homo sapiens
  misc_feature (2314)..(2314): n equals a,t,g, or c
  misc_feature (2321)..(2321): n equals a,t,g, or c
gcgcctgcatccgctttgtctacttctctttggaggatgagctcaaaagcaaggtgtttgcagaaaaaatgggcctggagacaggctggaactgccacatctccctcacacccaatggtgacatgcctggctccgagatccccccctccagccccagccacgcaggctccctgcatgatgacctgaatcaggtgtcccgagatgatgcagaagggctcctcctcatggaggaggagggccactcggacctcatcagcttccagcctacggacagcgacatccccagcttcctggaggactccaaccgggccaagctgccccggggtatccaccaagtgcggccccacctgcagaacattgacaacgtgcccctgctagtgccccttttcaccgactgcaccccagagaccatgtgtgagatgataaagatcatgcaagagtacggggaggtgacctgctgcctgggcagctctgccaacctgcggaacagctgcctcttcctccagagcgacatcagcattgccctggatcccctgtacccatcccgttgctcctgggagacctttggctacgccaccagcatcagcatggcccaggcctcggatggcctttctcccctgcagctgtcagggcagctcaacagcctgccctgttccctgacctttcgccaggaggagaccatcagcatcatccggcttatcgaacaggctcggcatgccacctatggcatccgtaagtgcttcctcttcctgctgcagtgccagctgactcttgtggtcatccagttcctttcttgcctggtccagctgccgccactcctgagtaccaccgacatcctgtggctgtcctgcttttgctaccctctgctcagcatctctctgctggggaagcccccccatagctccatcatgtctatggcaacggggaaaaacctccagtccattcccaagaagacccagcactacttcctgctctgcttcctgctcaagttcagcctcaccatcagctcctgcctcatctgctttggcttcacactgcagagcttctgtgacagctcccgggaccgcaacctcaccaactgctcctccgtcatgctgcccagcaacgacgacagggctccagcctggtttgaggactttgccaatggactgctgtcggctcagaagctcacggccgccctgattgtcctgcacactgtcttcatttccatcacccatgtgcatcgcaccaagcccctgtggagaaagagccccttgaccaacctctggtgggccgtgacagtgcctgtggtgctgctgggtcaggtggtccagacggctgtggacctgcagctgtggacacacagggacagccacgtccactttggcctggaggacgtgcccctgctgacatggctcctgggctgcctgtccctggtccttgtggtggtgaccaatgagatcgtgaagctacatgagattcgggtccgagtccgctaccagaagcgacagaagctgcagtttgaaactaagctgggcatgaactctcccttctgagccactggctgtggtggctgtagttgcccccgtccctggggctaaagccagacccatttctgaacaggggagtttgtatcatgaatgtttccaggtttgctcctgcacccgtggcactggaaacccagctccccgtgtcagaccccgctgtcttcctgagccctggggctcactgtggaggagctgacggcctgggcccttggccagtcctggctcttccctgggcctcaccagggacactcttgaatgtatggcctcaggcgctccctagagggggcctaaaccccctcacctgtgagctaccccctttagggatcccttgcccccttggagatcccttgccccccagtgcctctgctcgtgggtccctggacacggccttgaagccaaccttctttggaggagcaacagcagcagccttggccgacgcgtccaactcccaaggctgccgtggagggcaggggggtggtgcttgcctggatgtggccccgagtgcctcccctccctccctctgtgggggagtctcccgcctgaacctgaagatggagcagggcccccgcttcgccctggagcctcttcctgtgcctggctcaagctggctgcctgtcagtcttggggaatctggcccaggtctcctcagcctctgccccagttctgggagaagtttctactggtgtatattttttactggaaatgagccttttaggaatgaatgtagactggtttgtattaaaatgtgtcaattgctaagaaaaaaaaaaaaaaaaaatgaccctcgnggggggncccggaacggggtttgacaattcccgtcccgtcccccg

SEQ ID NO: 1460 - DNA, 301 bp, Homo sapiens
ggcacgagggggagaagggtcccctctctctgcccctcccactccttttctacggcgatttgtctgtgtctgccccccacccactgcccatcccccattgttgtctggatgtggttctattttttatcggtctccttaaccctcccccccgttctcgcccccgccccaccccctgctcccactaccctttgtctcttgctctttcttgggcttctgtacaactcaacttgtatacactgtgtacacacaaccagccaaacgaaaacccaacggcaaacactttaaaaaaaaaaaaaaaaaa

SEQ ID NO: 1461 - DNA, 467 bp, Homo sapiens
  misc_feature (456)..(456): n equals a,t,g, or c
gcaggtcgacactagtggatccaaagaattcggcacgagattgctctatggtgggatcaccacagctgctgtggggcctttacaaatgcaaaaaagctgtcagtgtttgtttcatcagctgcataagtgatgaggccaagttgaggaatccattccagtgcgcagtgtgcaggctgtagctattattgtttacagaattagtgtgttggagctttaaaatagttggcacatcgtctgccctttaaaagcacaagactaaggaatgagaccagttggttgtccttgtaatgttggccggatccagcccagcccttgtcttttaacagctactgctccgggctgtgctgtgggacttgactactctttggaggaagtgggggtgcttgctgagttcttgtctctgtagttctgcatcccaaacttaggtttgcattaaaaaaaaaaaaaaaaaaaacnccggggggggg

SEQ ID NO: 1462 - DNA, 491 bp, Homo sapiens
  misc_feature (408)..(408): n equals a,t,g, or c
  misc_feature (415)..(415): n equals a,t,g, or c
  misc_feature (450)..(450): n equals a,t,g, or c
  misc_feature (469)..(469): n equals a,t,g, or c
gcttaattcattgctctatggtgggatcmccacagctgctgtggggsctttacaaatgcaaaaaagctgtcagtgtttgtttcatcagctgcataagtgatgaggccaagttgaggaatccattccagtgcgcagtgtgcaggctgtagctattattgtttacagaattagtgtgttggagctttaaaatagttggcacatcgtctgccctttaaaagcacaagactaaggaatgagaccagttggttgtccttgtaatgttggccggatccagcccagcccttgtcttttaacagctactgctccgggctgtgctgtgggacttgactactctttggaggaagtgggggtgctgctgagttcttgtctctgtagttctgcatcccaaacttaggtttgcataaaaanaaaaagnaggaaaaaactcgagagtacttctaaagcggccgngggcccatcgattttccanccgggtggggttaccagggtaa

SEQ ID NO: 1463 - DNA, 682 bp, Homo sapiens
ggcacgagccaggctggagttcagtggcaccatcttggttcactgcagcctcaatctcctggtgtcaagcaatcctcccacctcagcctcccaagtagctgagactgcaggtacgtgccaccacgcccagctaatttttgtattttttgtagctatggggtctcactatgttgcttgctcagactggtctgaaactcctgggctcaagcagtcctcctgcctctgcctcccaaagtgttggggttacaggcatgagccacagtgccttgcccataaatgtattttaaaaggaaatttcaaaactccgctgcatatggaaaatgataatctcttctcttaaatataaggtcagatgctttgcatgttgatacggcatgttggttgcttctggctagctgctgttgcttgctgaaagctttcagcctgaaaccgtgctctatatttgtttttaaaaagtggattacaggcttgagccaccgcgccaggcctacaaaaaatttttttaaaaattagttgggcgtggtggtgcatgcctgtagtcctagctacttgggaggctgaggcaggaggattgcttgaaccctgaatgttgaggctgcagggagctataattgcaccactgcactctcttgtgggtgacagaatgagatgctgtctctttaaaaaaaaaaaaaaaaaaaaa

SEQ ID NO: 1464 - DNA, 1072 bp, Homo sapiens
  misc_feature (618)..(618): n equals a,t,g, or c
tttcctcgtgcttaccacagtggttttaaccaaggctacaattttgctgaagctgtcaacttttgtactgctgactggctacctgctggacgccagtgcattgaacactaccgccggctccggcatattgtgtcttctcccacgaggagctcatctgcaagatggctgccttcccagagacgttggatctcaatctagcagtagctgtgcacaaggagatgttcattatggttcaggaggagcgacgtctacgaaaggcccttttggagaagggcgtcacggaggctgagcgagaggcttttgagctgctcccagatgatgaacgccagtgcatcaagtgcaagaccacgtgcttcttgtcagccctggcctgctacgactgcccagatggccttgtatgcctttcccacatcaatgacctctgcaagtgctctartagccgacagtacctccggtatcggtacaccttggatgagctccccaccatgctgcataaactgaagattcgggctgagtcttttgacacctgggccaacaaagtgcgagtggccttggaggtggaggatggcmgtaaacgcagtgagtgacaggaaatggaaggaacccttgtgtaagccntatttctttcttttgggtattctcaaccttccttttctgctaacactgcctacctgttgcaacttacactctccaggctttgaagagctaagggcactggagtctgaggctcgtgagaggaggtttcctaatagtgagctgcttcagcgactgaagaactgcctgagtgaggtggaggcttgtattgctcaagtcctggggctggtcagtggtcaggtggccaggtacgtgagaggagaaggcaaagaagggtgtcagtgtgtgaaaatgaataacaaaaatggatagactataaacacacaatcctgtttgaggctgaggcaggagaattgtttgaacccaggagacagaggttgcagtgagccgagatggcatcattgcactccagcctgggcagcaagagcaaaactccatctcaaaacaacagcaaaaaaaaaaaaaaaaaaaaactcga

SEQ ID NO: 1465 - DNA, 550 bp, Homo sapiens
  misc_feature (521)..(521): n equals a,t,g, or c
  misc_feature (536)..(536): n equals a,t,g, or c
tcgtgggagaagacacaatagcgccggagccggcggtagtgttcaatgcactggcgtccagcaggtagctgcaagtgcgttcaagattgtgtgtggctatctggagaccacaatgcatagttctccacaataatccttacccatattctttatactttctacytgcaggcccactgcatgctcactcacccagtcagcagtacaaaagttgacagcttcagcaaaattgtagccttggttaaaaccactgtggtaagcacgaggaaaagtgatgacaaactcccctgcacactggtttgtgcggacaactggcacaccatgggacatcaaagtgttgggattcatgagagtgacaagctggtgtaggagatcaggctggctatcaaacagctcaggtgtcagcatcttcatcacctcctccaaatgctctgctgccagggagggtacaccataccaggtcttcggctcaccccaatgcagatagttaatagaggggtccagtgtcctctttaaacgaacanaggtgagatacccanaccccccccccccc

SEQ ID NO: 1466 - DNA, 3006 bp, Homo sapiens
  misc_feature (1045)..(1045): n equals a,t,g, or c
agccattcgcgccctcggccaagctgcacttatccacgatgtgaacctcggagaattcgccatgcgctggtcattttttggccttgtcagcctgatgggcttttttgctgctgtgccaccggccagcgcagatgaagattatgcggtgctgatcatttcccgggagcgtctggaagtgccgaccaactgcgagattggcttgtacatccaggaccagttggccgggcggctgttccaggagcaggccacctccttcaacttgccggccgggaatgtgtcgttgcgcctgaagttgttgccggggcaatcccagggctgcttgccgggcatgctcgcgccacctgcgcaaaacatcacgttgaaggcgggtgacgtgcgcaagttgcgtatcgcgcaagggccggacggcatgtacctgaaaccggccgcactggaatactgaaacattgatctaacgccttgaccttccccacaggtcaaggttgatcctaggggcaatctctcctggagtactgcccatgaacggatccaccaccttcgacctgccaatcagcggcatgacctgcgccagctgcgccgggcgggttgaacgggcactgggcaaagtgcccggggtgcaaagtgtcagcgtcaacctggccaacgaacgcgcccacattgaagtgctcggccagatggaccccggcgtcctgatcgccgccgtcgacaaggccggctacaccgccaccctgccccaaagcgaaaccgccacccaggccagccaggaacaacgcctgagccatgaacgctggtcgttgctgctggcaatcctgctcgccgcgccgttggtgctgccgatgctggtgcaaccgttcgggctgcactggatgctcccggcctgggtgcaatttgccctggccaccccggtgcaattcatcttcggtgcgcgcttctatatcgcggcctggaaagccgtgcgcgccggagcgggcaatatggacctgctggtcgccatcggcaccagcgccggttacggcctgagtatctatgaatggctcacggcgtncgccggcacaatgccccacctgtatttcgaagcctcggcggtggtgatcgccctggtgctgctgggtaaatacctggaaagccgcgccaagcgccagaccgccagtgccatccgtgccctggaagccttgcgccccgagcgggcgattcaagtaatcgacggccgcgagcaggacgtcgccatcaccgccctcaagctgaatgacctggtgctggtcaaacccggcgaacgcttcccggtggacggcgaagtggtcgaaggccaaagccacgccgacgaagccttgatcagcggtgaaagcctgccggtgccgaagcagcctggcgacgcagtcaccggcggcgccatcaatggcgaaggccggctgctggtgcgtaccctggccctcggcgcggaaagcgtgctggcgcggatcatccgcttggtggaggacgcccaggccgccaaggcaccgatccagaaactggtggataaagtcagccaggtgttcgtgccggtggtgctggtgctggccttggcccgctggtcggctggtggctgtatggcgcaccgctggaagtcgcgctgatcaatgccgtgaccgtattggtgatcgcctgcccttgcgcccttggcctggccacacctaccgccatcatggccggtaccggcgttgccgcccgccacggcatcctgatcaaggacgccgaagccctggagcgcgcccatgaagtcagcgccgtggtgttcgacaagaccggcaccctgacctccggcgcaccaaaaattgcgcacctggccgccattgacggcaatcaaggggcgctcctgcaacaggccggcgcgctgcagcgcggcagtgaacacccattggccaaggcggtgctggatgcctgtgccgaacaaggtttgaacgttgcggatgtcagcgccagccagtcccttaccgggcgtggcattgcaggcaccctagatggccggcaactggcgctgggcaaccgtcgcctgctggaagaaaccggcttgagcaccggtgatctcgccgactcggccagtgcgtgggaggccgaaggccgcaccttgtcctggctgatcgagcaaggcccgcagccccgcgtgctgggtttgtttgccttcggtgacacgcttaaaccgggcgccctgcaggcgatacaagcactcaaggctcggcatatcagcagccacctgctgaccggcgataaccgtggcagcgcccgcgtggtggccgaagccctgggcatcgatgacgtgcacgccgaggtgttgcctgcggacaaggcggctaccgtcgccgagctgaaaaagaccggcgtggtggcaatggtcggcgacggcatcaacgacgcaccggccctggccgcggccgacatcggcatcgccatgggcggcggtaccgacgtggcgatgcacgcggcaggtattaccctgatgcgcggcgatccacggctggtgccggcagccctggaaataagccgcaagacctatgcgaaaattcgacagaatctgttctgggcctttgtgtataacttgatcggcattccgctggcggcgttcggcctgctcaacccggtaatggctggcgcggccatggccctgtccagtgtcagcgtggtgagcaacgcactgctgttgaaaacctggaaacccaaggacctggaggacgagcgtccatgaacatcggccaagcagcacgccaaagcggcctgagcgcgaagatgattcgttactacgagtccatcggcttgctgaaagccgcccatcgcaccgacagcggctaccgcatttatggcgccgatgacttgcacaccctcgcgtttatcaagmgctcgcgggacctgggtttttccctggaagaggtcggcaagttgctgacgctgtggcaggaccggggacgcgcgagtgccgacgtcaaggcgctggcccgccagcatatcgatgagctgaaccagaagatcctcgag

SEQ ID NO: 1467 - DNA, 3046 bp, Homo sapiens
aattcggcacgagcattcgcgccctcggccaagctgcacttatccacgatgtgaacctcggagaattcgccatgcgctggtcattttttggccttgtcagcctgatgggcttttttgctgctgtgccaccggccagcgcagatgaagattatgcggtgctgatcatttcccgggagcgtctggaagtgccgaccaactgcgagattggcttgtacatccaggaccagttggccgggcgtctgttccaggagcaggccacctccttcaacttgccggccgggaatgtgtcgttgcgcctgaagttgttgccggggcaatcccagggctgcttgccgggcatgctcgcgccacctgcgcaaaacatcacgttgaaggcgggtgacgtgcgcaagttgcgtatcgcgcaagggccggacggcatgtacctgaaaccggccgcactggaatactgaaacattgatctaacgccttgaccttccccacaggtcaaggttgatcctaggggcaatctctcctggagtactgcccatgaacggatccaccaccttcgacctgccaatcagcggcatgacctgcgccagctgcgccgggcgggttgaacgggcactgggcaaagtgcccggggtgcaaagtgtcagcgtcaacctggccaacgaacgcgcccacattgaagtgctcggccagatggaccccggcgtcctgatcgccgccgtcgacaaggccggctacaccgccaccctgccccaaagcgaaaccgccacccaggccagccaggaacaacgcctgagccatgaacgctggtcgttgctgctggcaatcctgctcgccgcgccgttggtgctgccgatgctggtgcaaccgttcgggctgcactggatgctcccggcctgggtgcaatttgccctggccaccccggtgcaattcatcttcggtgcgcgcttctatatcgcggcctggaaagccgtgcgcgccggagcgggcaatatggacctgctggtcgccatcggcaccagcgccggttacggcctgagtatctatgaatggctcacggcggtccgccggcacaatgccccacctgtatttcgaagcctcggcggtggtgatcgccctggtgctgctgggtaaatacctggaaagccgcgccaagcgccagaccgccagtgccatccgtgccctggaagccttgcgccccgagcgggcgattcaagtaatcgacggccgcgagcaggacgtcgccatcaccgccctcaagctgaatgacctggtgctggtcaaacccggcgaacgcttcccggtggacggcgaagtggtcgaaggccaaagccacgccgacgaagccttgatcagcggtgaaagcctgccggtgccgaagcagcctggcgacgcagtcaccggcggcgccatcaatggcgaaggccggctgctggtgcgtaccctggccctcggcgcggaaagcgtgctggcgcggatcatccgcttggtggaggacgcccaggccgccaaggcaccgatccagaaactggtggataaagtcagccaggtgttcgtgccggtggtgctggtgctggccttggccacgctggtcggctggtggctgtatggcgcaccgctggaagtcgcgctgatcaatgccgtgaccgtattggtgatcgcctgcccttgcgcccttggcctggccacacctaccgccatcatggccggtaccggcgttgccgcccgccacggcatcctgatcaaggacgccgaagccctggagcgcgcccatgaagtcagcgccgtggtgttcgacaagaccggcaccctgacctccggcgcaccaaaaattgcgcacctggccgccattgacggcaatcaaggggcgctcctgcaacaggccggcgcgctgcagcgcggcagtgaacacccattggccaaggcggtgctggatgcctgtgccgaacaaggtttgaacgttgcggatgtcagcgccagccagtcccttaccgggcgtggcattgcaggcaccctagatggccggcaactggcgctgggcaaccgtcgcctgctggaagaaaccggcttgagcaccggtgatctcgccgactcggccagtgcgtgggaggccgaaggccgcaccttgtcctggctgatcgagcaaggcccgcagccccgcgtgctgggtttgtttgccttcggtgacacgcttaaaccgggcgccctgcaggcgatacaagcactcaaggctcggcatatcagcagccacctgctgaccggcgataaccgtggcagcgcccgcgtggtggccgaagccctgggcatcgatgacgtgcacgccgaggtgttgcctgcggacaaggcggctaccgtcgccgagctgaaaaagaccggcgtggtggcaatggtcggcgacggcatcaacgacgcaccggccctggccgcggccgacatcggcatcgccatgggcggcggtaccgacgtggcgatgcacgcggcaggtattaccctgatgcgcggcgatccacggctggtgccggcagccctggaaataagccgcaagacctatgcgaaaattcgacagaatctgttctgggcctttgtgtataacttgatcggcattccgctggcggcgttcggcctgctcaacccggtaatggctggcgcggccatggccctgtccagtgtcagcgtggtgagcaacgcactgctgttgaaaacctggaaacccaaggacctggaggacgagcgtccatgaacatcggccaagcagcacgccaaagcggcctgagcgcgaagatgattcgttactacgagtccatcggcttgctgaaagccgcccatcgcaccgacagcggctaccgcatttatggcgccgatgacttgcacaccctcgcgtttatcaagcgctcgcgggacctgggtttttccctggaagaggtcggcaagttgctgacgctgtggcaggaccggggacgcgcgagtgccgacgtcaaggcgctggcccgccagcatatcgatgagctgaaccagaagatcctcgagagtacttctagagcggccgcgggcccat

SEQ ID NO: 1468 - DNA, 1954 bp, Homo sapiens
  misc_feature (1943)..(1943): n equals a,t,g, or c
gggacgtggaagctctgtctccgttgatattcctggcgctgtccctgaatggctttggtggcatctgcctaacgttcacttcactcacgctgcccaacatgtttgggaacctgcgctccacgttaatggccctcatgattggctcttacgcctcttctgccattacgttcccaggaatcaagctgatctacgatgccggtgtggccttcgtggtcatcatgttcacctggtctggcctggcctgccttatctttctgaactgcaccctcaactggcccatcgaagcctttcctgcccctgaggaagtcaattacacgaagaagatcaagctgagtgggctggccctggaccacaaggtgacaggtgacctcttctacacccatgtgaccaccatgggccagaggctcagccagaaggcccccagcctggaggacggttcggatgccttcatgtcaccccaggatgttcggggcacctcagaaaaccttcctgagaggtctgtccccttacgcaagagcctctgctcccccactttcctgtggagcctcctcaccatgggcatgacccagctgcggatcatcttctacatggctgctgtgaacaagatgctggagtaccttgtgactggtggccaggagcatgagacaaatgaacagcaacaaaaggtggcagagacagttgggttctactcctccgtcttcggggccatgcagctgttgtgccttctcacctgccccctcattggctacatcatggactggcggatcaaggactgcgtggacgccccaactcagggcactgtcctcggagatgccagggacggggttgctaccaaatccatcagaccacgctactgcaagatccaaaagctcaccaatgccatcagtgccttcaccctgaccaacctgctgcttgtgggttttggcatcacctgtctcatcaacaacttacacctccagtttgtgacctttgtcctgcacaccattgttcgaggtttcttccactcagcctgtgggagtctctatgctgcagtgttcccatccaaccactttgggacgctgacaggcctgcagtccctcatcagtgctgtgttcgccttgcttcagcagccacttttcatggcgatggtgggacccctgaaaggagagcccttctgggtgaatctgggcctcctgctattctcactcctgggattcctgttgccttcctacctcttctattaccgtgcccggctccagcaggagtacgccgccaatgggatgggcccactgaaggtgcttagcggctctgaggtgaccgcatagacttctcagaccaagggacctggatgacaggcaatcaaggcctgagcaaccaaaaggagtgccccatatggcttttctacctgtaacatgcacatagagccatggccgtagatttataaataccaagagaagttctatttttgtaaagactgcaaaaaggaggaaaaaaaaccttcaaaaacgccccctaagtcaacgctccattgactgaagacagtccctatcctagaggggttgagctttcttcctccttgggttggaggagaccagggtgcctcttatctccttctagcggtctgcctcctggtacctcttggggggatcggcaaacaggctacccctgaggtcccatgtgccatgagtgtgcacacatgcatgtgtctgtgtatgtgtgaatgtgagagagacacagccctcctttcagaaggaaaggggcctgaggtgccagctgtgtcctgggttaggggttgggggtcggccccttccagggccaggagggcaggttccctctctggtgctgctgcttgcaagtcttagaggaaataaaaagggaagtgagaaaaaaaaaaaaaaagggcggccgctctagaggatccctcgaggggcccaagcttacgcgtgcatgcgacgtcatagctntctccctatag

SEQ ID NO: 1469 - DNA, 695 bp, Homo sapiens
  misc_feature (48)..(48): n equals a,t,g, or c
  misc_feature (50)..(50): n equals a,t,g, or c
  misc_feature (657)..(657): n equals a,t,g, or c
  misc_feature (664)..(664): n equals a,t,g, or c
cacaaggacaaggggagaagagaacttctttaaggcctctgaggctgngnatctaccttggtggggtctggggccaggcagtctcccccacgggcctgccccctcctctcacagctgatctacgatgccggtgtggccttcgtggtcatcatgttcacctggtctggcctggcctgccttatctttctgaactgcaccctcaactggcccatcgaagccttcctgcccctgaggaagtcaattacacgaagaagatcaagctgagtgggctggccctggaccacaaggtgacaggtgacctcttctacacccatgtgaccaccatgggccagaggctcagccagaaggcccccagcctggaggacggttcggatgccttcatgtcaccccaggatgttcggggcaccttcagaaaaaccttccttgagaggacggggttgctaccaaatccatcagaccacgctactgsaagatccaaaagctyaccaatgccatcagtgccttyaccctgaccaacctgctgcttgtgggttttggcatcacctgtctcatcaacaacttacacctccagtttgtgacctttgtcctgcamacattgttcgaggtttcttccactcagctgtggagtctctatgtggagtggttccaatcaaacanttttggnaggctaaaaggctgcagtcctcatagtggtg

SEQ ID NO: 1470 - DNA, 2766 bp, Homo sapiens
  misc_feature (2757)..(2757): n equals a,t,g, or c
  misc_feature (2760)..(2760): n equals a,t,g, or c
ggagatgcagctccaaaagccccacagcactgccaatattcctggagctcactgccggagttctagcatttgttttcaaagactggatcaaagaccagctgtatttctttataaacaacaacatcagagcatatcgggatgacattgatttgcaaaacctcatagacttcacccaggaatattggcagtgctgtggggcttttggagctgatgattggaacctaaatatttacttcaattgcacagattccaatgcaagtcgagagcgatgtggcgttccattctcctgctgcactaaagatcccgcagaagatgtcatcaacactcagtgtggctatgatgccaggcaaaaaccagaagttgaccagcagattgtaatctacacgaaaggctgtgtgccccagtttgagaagtggttgcaggacaatttaaccatcgttgctggtattttcataggcattgcattgctgcagatatttgggatatgcctggcccagaatttggttagcgatatcgaagctgtcagggcgagctggtagaccccctgcaaccgctgctgcaagacactggacagacccagctttcgggaccctcccgcgtgccgaactgatcttcgagctgcatggacctaatcacagatgcagcctgcagtctcgcctaatggagctgccattaggggagtgtaaaactgggaaatgctgctcactgacagaattaaaaaaaaaaataaccagtatgaaagtcgttgcgccgtgaatctctactgtagccatgaatttatggacagttagatgcttaccaaaaaagaaaaaaagggagggtaggggacccagatgtacttgaatgtgcagaaaatacattcttgtcctcatcttccgtaattggagggctgggagaggcagctttgctcttcaccacaccttggacggaccaccttctttctgttccatggcctgaaggagtgcatctcctcaaagactcagcccctcacctgggagggcagtggtttgtgggcatccctccatgtacattttaggaaacacttgcaactctcatctgaagaagaaaacaactcatctttgggttcagattttgtgatggtattcagcaagtcacttgggcgagcacacttggtctatcctggaaagtctccttataagagaagttgtgtatttcatgtgcaccgagcaagggcattggaagacgtcatgaggctgtattttagcaggactgatcgtttttctaagtagacctgagctttgtttatcagtgaaattcaaggagaaaatgaggttaatgaagaggtatcagttaaatatccccttcttctcaccctgccaaaattagcagttggatttttggaaactctggaatattctgggtcattttgttttgtatgtttgttgtttttcgtcttccaaaggtgaaagctatgatacagttccacttaaattttagtgttttcttactcagctcaagcattaatttttgattaagtcttaatctgcatgacctgtgaatctgaatccatcatctccctttcctgccagcttttctacaaacattgaaatatgttatttggtcagcacttatttcctaggttcacagccttgggaggttgtggcatgtcctcccagtctggctgggaagagaccagctgtaccatccaaatgcttccctggtcttgatgatctcttccagagtcgatctgagtggccttttctgcaccctccccttctttctctttgaatggaattaaacccaatttggaaacaacattgacccagtcaaaagcttctaatggtttctttttcttcctccagttttagtttgcttttattaaaaaaagaaaatagtgcatggccatagctccttcagttctcttattgcagactaaccatcaggatggtatcaaagcacaaatactttggaggggaatgcgttgaactggggcaagtactctgtaacacaaagtgggaaaccayttcctggtgctgccgctcctgcccccactttaggtgggagggacgagttttgccctctagattttaatccagctggtgtccaccggatgttgccctcctggggagcagatatcagtctgtggaactctgggaaaaccacaggcacatttttcggtgcggacagatttgccagcacataactgggcagccagctagaatactttgtggaaattaagcgaggttttccatttcagccccatggtgcatggtggtggccgatgaatgtgtcagtctgctcagagaaaggacaaaaaggaaattattttcaaaactgtgttcactgtttgggtgtgtgtatggctctgcatgtgtgtgtttttgtctctgtataggtagaggtattcacatcttactccgactgtaaggttgtcttacttcatctctgcccccaccacagttgccattttgtaatgtccttccaacatggagaagacacgagctctctccagttggcatcatttgtcttttttgttgattgcctcattctccagtgaactccatctggccaattgattcagaatcaggcaagatccctgccctttggcacatccactgaaaggccaaacagcaagtccgagtgagttttaaatattaattaatcaccctttattttttacacttgagagtgattgtaataaaggctgtcattaataaacttggttctaccttaaaaaaaaaaaaaaaaaaaactcgacgggggggccctgtacctcaattcgcccctatagtgagntgnctcaaa

SEQ ID NO: 1471 - DNA, 2668 bp, Homo sapiens
  misc_feature (1603)..(1603): n equals a,t,g, or c
  misc_feature (2447)..(2447): n equals a,t,g, or c
  misc_feature (2646)..(2646): n equals a,t,g, or c
  misc_feature (2648)..(2648): n equals a,t,g, or c
ttyaggtgacactatagaaggtacgcctgcaggtaccggtccggaattcccgggtcgacccacgcgtccgattcatagcagtatggactcatggatacatattttattctgtgggcaatacccgttactatcattatttgtttttcttggcttgaatattctcagacttgggctttgggtgcttcttgtagtttgccgcaatgcccttttgatgtgatgctatcattatttttagtacatccttactttccaacagtatgggatcatctttgttttccccatcccagtcctgaaagtagccctttctccaagtgttcactggttgcttggttggagaatggtgcataggaaccaagatctgagtgcaagggtgctcttcactgttgggatgtcattgcttctgggtgtgttggagccagcaaatatatatatgtacactaattcatgcatgcacacatttgcatttatttatacatctatccatctgcgtgtgtatacgtgtgtgtatatgtgttaccatgagttaataccaattactctgatttcaatccaacacaatgggttctttctaattatttttaatttctctcaaaatcacttcttctggttcttccagaaaatgagctcttcacctagcttaagaatgtagagatgtcgtgtatggttgggcaggttgttcactgtccaagggtgttccagctgaggagagcgatgggagctgaaagcatccatgctctactccctaagctctgcactctaacatgtgctctgggtccaccagagtaagggatgccctcttttcacttgtgcaaatgcactgggtgagctagcaacagacctggtcgactgctgtctcgggatatttttgygtttacttgtgaaacacccaggcttgggctggattcccccagaggcagattgtgagctgaggatttgagtgcgaggagtattttgggatgtgattccaggaacctcccagagagaagcagtggggagtcaggcaggaaagaaagcatgcgtcagggagctggttactactgggccaccgaggctccatcccagtaaggaaccctggaagacgggaggaacgcaccttggagttgcttccctaagggatcaacttcagttggtcgccactcaaggctcctcctgaggggagcaggcacagagtccctggcacttctggccctgagtgcccaggggatgagtgcgtgacattgacggcttctgctgtcctctgtctcctgctttccccgtgggatgaactagcttgagaggcacaagattcctgagcaggcagagggactctgtaggagtctcagagctcctgaggctgcaccctcgccctggagccccgtgaaatcttcaattttgggttttatgagcttcacaaaccttccaggggcctctccggctccggatggggtgcgttggaggcctggtgcccacgtgtctcctgggccctccacctgtgccccgcctgtttgcacagtgtgcgtgagctgagcacctgagtttgctctttgaatcaagtgkttaactcactcacggtaatagtggctgataattcttgagctaacacaccttctactttgcggsctanccttgkttgcctttcagccctggkttawtatcttccatcggatgaagcttargagcaccagcgctgcctarggaaaccctggcccytccttccctgggatcatctgggtcccccagggctcaggctttacaacccctgctgcttggttacccacctcccacctggggcccctgacagatcaggggacaagcagatagagggctcaccagtgcagtccagtgtatgctgccgggcgggccggagcagagtgagtcagatttggctttttataatcatycaggtgccagggtgggcacgcgtcctgggtcatccttccagcgagggctcacatcatagcctgkcaccagcagtaattcagcaggagggtttagtttcctccctatgggatcagcgagggcagctgtctaagccccaggcacactgcctagggcggacgtgggggtgggggccgtcctcctagggctgccctgcctcttggcaggtgatcagccttcacctccttgtgtggtttaggggggctgcctcctgtctatgtcagagggcttctcagaaacaggcaccgctgtaggggcagcaagatgacttcacttggaaaatggaatgtacttaaacgagatcaagccacctcgtggagaagccattcccttccaatttgktttaatcctgctgattattgcaaagagaaagacttagcctggtgctaatgagtctttaatgcctctgaggacttcctaagttttccttttttttctaaacaagaaaagttaagcctcaggctgttcatccttctagttggaatttaataaccgtgttttgttttcatagaatttacctttggagttgnttattcatggcagggcctcctggttttccattttggggagtgataggaagttttccattaaattaatttattgtatatatttttttacagtgagtccttaatatattttgtaggtaatagtatgggtgaggttggcaaactatggccctgggctaaatctagtgtatagcatgtttttgtcaataaagctttatcascncncaaaaaaaaaaaaaaaaaag

SEQ ID NO: 1472 - DNA, 3248 bp, Homo sapiens
  misc_feature (7)..(7): n equals a,t,g, or c
  misc_feature (3219)..(3219): n equals a,t,g, or c
  misc_feature (3235)..(3235): n equals a,t,g, or c
ccccccntttttttttttttttttttttttttttttttttttttttttttttttttttttttttttttttttttttttttttttttttttttacttaaaaatgtcttatctttattaagtacagtaagttattctcatgtggaagaacaaggggaacatacatggggaatatgtattaattttgaataatgttgaaactatattaaaataagrtcgtaagttggcattcaccatggaattggggagaagtgctgctgtatatagaatgctagcttycagtaaagtaggaataaagmcaagcaaamcaagagcaaggatgccccaggaacsggctcccagcttcgttcatcatctttgtaaattatctagaaaagaamctataaaggatatctaaaggaaaatatataaaagtggaacctttgcagctgacattgaggtctatcagatagtgaaatactgaacgataatgatttcaagaaaatttattcagtgaccttcttttattgtctagtaaatcccagacactgcacttgcctccagaggcaggtgtaataccgcagaaaacaccgcctcgtggttctggggaccctgaaattttatatgaatgaacacagagaggcatttgcctgctttggcatttctgaaagtggactttaattgtgggatgttaaaagggattmcaataggacttytcagagccttcagtgtgagtgaatactgggaatcwtttctatgaatggggtatattatgcagtggtccccacatttatttgaagatagaatcttggttttgtttttggctttgtatgtgtgtgtttgtttttgragggmcaatatgtgaacttgtgagactagaataggctggaacacactctggaaaatgctgacttattaaaaaaaatagaggcatgtctggaatttaaagaattttggatatctcttcatcaaatatttgctaagtacttaaatcactgagaaatggcatgaggccccacacaagggagctctaaaatccagtgccccttcagagcagcaatgctcctaattgccgaaaagtgaacacaacagacaaatgtctgtcaactgataaatggataaacaaaatgtagtctatttatagaatggaatattacatggccataaaaataaatgaagtactggtacaagctataatatggtcaaccttgaaaacattatgctaagtgaaagaaaccagacgcaaaaggcctcatactgtatgattccactcatatgaaacatccagagtaaatctgaagacaaagaaagcagattcgtggttgccagaggttggagggagaggagaagaagaagtgactgctaatgagttcagagtttcttttagggatgaggagaatgttctgaagttagatagtgatgatggttatctatacaactttgtaaatatactaaaaatcactggattctgcactttaaaagaatgaattttataatatgtgtattttgtgtcattaaaagatccaacaccccaccataccaaatggttatccctttcatattataggaattgagatgaacacaaccatttcttgtcgacaattatatttagtgaagatactagatgttatttacagaagatatacatacatacaattcctacacattaaatgtagtctaattgtgaaaacaggaaaaaatgtacttcaaaattacgtactaaataaaataaataaaaagtaattatttggcacagtatctattatgtagcaaataaataactctataccattgattgaatgaactatttacaatctttgaaagtgcaaaacaattactgaaaattaagatatttgtaataacatttaagtccagaaaatatgttttcatcaggtacaataaatttgtagccaatagtaaaggtttttaatgcccaggaaaatatttcaattttgaaaaatgttttatgcatattgtgctcttctgaaatgttattttctactttaacgctggcaaatttaagaatcttggcatttcttagtggaattcttatgtatataatcctgatttgtaaattttgaaaagttacattgtaaacataaatattattctatatacattcagaaattacagaccagtcctccctaaattacataaacagccataatgtttcataataatgtggtcaggttctattccttcagaggtaagacaatgaagatggaagaatacaacctataatttggacttctatagattcctcaacaccttcccgaaaccccaggctccaaatcaagatgttgagttaaaattttatccaaatctatcccatttgtagcacatctcatcccataaacactcttagaaaaaaatgtcaggggcttgctagttctcttgacaaggctatttctaccaaactcttcacgtgggccttattcaacacttcagcaaagaagatggcacaagtggaaatgaaacagggtagccacaaactggggattcctaagctagagtgtgtaagctttaggcatgtcaaataattccttctcttgctaggtagctggtaagctgaatgcarccctgaggtgtctcaggatgtgtttttgcttgttttgtagaattctctagtggcaatacagtcagtagtagcataaatggcatttttgaaagattgtggactggagacaaactgttgctttgggcatttgaaatgtctatggtcgacgaggctctaatctgtgtgacatctgtgataaagttctctggttgtcaatcacatttaattgccgtacataactccggacatcctgatggttcttattagcttgagctgcatcaggattgaagggttggctcctgtagtatctcactgttctggccgtatttgcaatcatgcgcatttttcaaagtttactagattgtcaatgaacgtcttgttcccctcatgagtaaatgtcatatctttaatgagcaaaggcatgaaggggatgagaggaggttccagcttagctactgtcagcctgtaggccctgtggttccttgaagggtccattaaactttcaaactccgcatagaacttcttgaacttgcttggcagtttctcccacgttagtgccaagcggctcacagcaacgttacttagtcccatgmcgatggcaaaaaaggaattcagatttttatactccttacagtgggctgctatcttaataaatttttttaatagctgaacacgckkgctgaggngacctcaaagccaaanctcgaagctttgt

SEQ ID NO: 1473 - DNA, 2388 bp, Homo sapiens
  misc_feature (2340)..(2340): n equals a,t,g, or c
cccacgcgtccggaaacgggctctaacaatgacaggattcctgacaaggagaacacacctctcattgaacctcacgttcctcttcgtcctgctaacaccattaccaaggtcccttcagagaagatcctcagagctggaaaaattttacgaaatgccattctctctcgagcacctcacatgataagagatagaaaataccacctaaagacatacagacaatgctgtgtgggaactgaactggtggactggatgatgcagcagacaccatgtgttcactcccggactcaagctgttggcatgtggcaagtcctgktagaagatggtgttctcaaccacgtggaccaggagcaccatttccaagacaaatatttattctatcgatttctggatgatgagcacgaggatgcccctttgcctactgaggaggagaagaaggagtgtgatgaggagctccaggacaccatgctgctgctgtcacagatgggccccgacgcccacatgaggatgatccttcgcaaaccacctggccagaggactgtggatgacctagagattatctatgaggagcttcttcatattaaagccttatcccatctttctaccacagtgaaacgagagttagcaggtgttctcatttttgagtctcacgccaaaggagggactgtgttgtttaaccagggggaagaaggtacctcctggtacattattctaaaaggatcagtgaatgtagtcatttacggcaagggtgtggtctgcaccctgcatgaaggagatgacttcggcaagttagcactagtgaatgatgccccwcgagctgcctctatcgtcttacgagaagataactgccatttcttaagagtagacaaggaggatttcaaccggatcctaagggacgtggaggcgaatacagtcagacttaaagaacatgaccaagatgtcttggtgctggagaaggtcccagcagggaacagagcttctaatcaaggaaactcacagcctcagcaaaagtatactgkgatgtcaggaacacctgaaaaaawtttagagcattttctagaaacaatacgccttgaggcaactttaaatgaagcaacagattctgttttaaatgactttattatgatgcactgtgtttttatgccaaatacccagctttgcccggcactggtggcccactaccacgcacagccttcacaaggtacagaacaggagaaaatggattatgccctcaacaataagaggcgagtcatccgcctggttctacagtgggctgccatgtatggagacctcctgcaagaggatgacgtgtctatggccttcctggaggagttttatgtatctgtatcagatgatgcccggatgattgctgccctcaaggagcaactgccagagttggagaagattgtcaagcaaatctcagaagatgcaaaggcaccacaaaagaagcacaaggttcttttgcaacagttcaatacgggcgatgagagagcccagaagcgccagcctatccgcggctctgatgaagttctgtttaaggtctattgcatggaccacacctacacaaccattcgggtgccagtggccacttcggtgaaggaagtcatcagtgcagttgccgacaagctgggctccggggagggcctgatcatagtcaagatgagttccggaggagaaaaggtggtgctcaaacctaatgatgtttcagtatttacgacgctcaccattaatggacgcctgtttgcttgcccscgagagcaattcgattcactgactcccttaccagaacaggaaggcccaactgttggaacagtgggaacttttgaactgatgagctccaaagatttagcataccagatgacaatttatgattgggaactcttcaactgcgtgcatgagctggagctaatctatcacacatttggaaggcataattttaaaaagaccacagcaaacttggatttgttcctgaggagatttaatgaaattcagttttgggtcgtcactgagatctgcctttgktctcagctcagcaagcgtgttcagctattaaaaaaatttattaagatagcagcccactgtaaggagtataaaaatctgaattccttttttgccatcgtcatgggactaagtaacgttgctgtgagccgcttggcactaacgtgggagaaactgccaagcaagttcaagaagttctatgcggagtttgaaagtttaatggacccttcaaggaaccacagggcctacaggctgacagtagctaagctggaacctcctctcatccccttcatgcctttgctcattaaagatatgacatttactcatgaggggaacaagacgttnattgacaatctaggaaactttgaaaaatgcccatgattgcaaatacgg

SEQ ID NO: 1474 - DNA, 2207 bp, Homo sapiens
  misc_feature (2203)..(2203): n equals a,t,g, or c
ggcgatctgccgtcatatcagcttatggcgccggtcgctgattggctggccgctccagcctcccggcccgcttgctggctgcccagctgctaggacagtttgcagagcagtggcgtgcggagcggcggcggaccacctccaggggctaagtgatggatcttgtactccgtgttgcagattactatttttttacaccatacgtgtatccagccacatggccagaagatgacatcttccgacaagctattagtcttctgattgtaacaaatgttggtgcttacatcctttatttcttctgtgcaacactgagctattattttgtcttcgatcatgcattaatgaaacatccacaatttttaaagaatcaagtccgtcgagagattaagtttactgtccaggcattgccatggataagtattcttactgttgcactgttcttgctggagataagaggttacagcaaattacatgatgacctaggagagtttccatatggattgtttgaacttgtcgttagtataatatctttcctctttttcactgacatgttcatctactggattcacagaggccttcatcatagactggtatataagcgcctacataaacctcaccatatttggaagattcctactccatttgcaagtcatgcttttcaccctattgatggctttcttcagagtctaccttaccatatatacccttttatctttccattacacaaggtggtttatttaagtctgtacatcttggttaatatctggacaatttccattcatgacggtgattttcgtgtcccccaaatcttacagccatttattaatggctcagctcatcatacagaccaccatatgttctttgactataattatggacaatatttcactttgtgggataggattggcggctcattcaaaaatccttcatcctttgaggggaagggaccgctcagttatgtgaaggagatgacagagggaaagcgcagcagccattcaggaaatggctgtaagaatgaaaaattattcaatggagagtttacaaagactgaatagattattgcccagttattcttaagtaaggacaaagaaggaaatatcatcgtatttcttttttttaataaggaaaaaataatmtccatacagtcaagatacatagtaaatggtatcatttggaaatcagcatcgtgggcactgctgaggaatgatcctagtggtaggtcagaagaagatgctgtgaacaccaggactttaatcttatgcttaaaatgccagatgttgttcgggggacaacttgtatctttctagcagcagatctgtagtttgtatagcctcaacaacaattttaaataagatggagaataaattattgaggggactaggctatatgcatttgccttcatccacccatgtttattaagaatcattgtgcttaataataccaagactaagcaccataaccaagaaatactaatgtaaagattgtttcttgtttcaggaatggttaattcttcaacgttggtatgataatgataacttgttttgacttgaataaagtactacatcagtgtggaaaaaaattctgatacattagcagctatgtaaatgacctaattgatagcaggtgtaataagactatcgtcttcctacacataggaggctcattctctggacacactatcacctattacattttactgattaacaaataaattggaatttaaaaatatcgatatcaccatgatttaatccagatctgggattatgtagctaaacattgtgatgattattatttaaaaccattatttaataagagtaaaaatatgtgaatctggatatatttaaaaaaagaaatttgatgcccagataatatattaggcactactgattttttagttaaattgatgcactacacttttgatgtttgaagttacaaacctgtaatttttttgtaaaggaaataattgccaaatacctaggcccattgctgacgattagttctaaaatcttattcctcctcttctcccctcacttttccctacttcctctgcaaaaagatttaacaaatacattcataaggaaatgtgtgttgtaacaaatatattgcaaaaacatagtttgtaaaggcattctataagctatttatgtaaaatcaataaaagttgatcataattaaaaaaaaaaaaaaaaaaaaaaatataaaaaanctat

SEQ ID NO: 1475 - DNA, 5245 bp, Homo sapiens; identical to SEQ ID NO: 202

SEQ ID NO: 1476 - DNA, 508 bp, Homo sapiens
  misc_feature (8)..(8): n equals a,t,g, or c
tgcaggtngacactagtggatccaaagaattcggcacgagccagggagatgtggaccagaaaacctagctctgcaagctacccagagagggacaagattctcggtgcctatgtgtaagagttcacgccagtacacgtatacatcagtgcatatgtgtcagtgtgcgtgtgagcgtgtagagtggagggggtcactgacaccagccagggcgttgcataaccacctgacagagcaatggtttccccatggcttccccttcttgtctcgctttttcacttactgaattgtctccgcggtgttggcacgtctggccagagcctgggactgccctcctcatccttcccaccaacaccagagcacaaggccactgcccgtgactgaaccacagggatgctgcacacgtccagggatcctgtcctttcccttcctttgtaagagtgtcccagcctcctgtcccctacactcagaccaaactgttccatggtggtgactccagccctgactcgag

SEQ ID NO: 1477 - DNA, 1053 bp, Homo sapiens
  misc_feature (900)..(900): n equals a,t,g, or c
  misc_feature (907)..(907): n equals a,t,g, or c
  misc_feature (926)..(926): n equals a,t,g, or c
gaaagatgaagtgctgtgaaatattgtaggagcagaaacttgaaatgtggcaaaaaccacatgggcaaaatttctgtctcttttcttatttttgcttttttgtttaaaggtttttctattgggaaagctactgatcggatggatgctttcaggaaagcaaagaacagagcagttcaccatttgcattatatagaacgatatgaagaccatacaatattccatgatatttcattaagatttaaaaggacgcatatcaagatgaagaaacaacccaaaggttacggcctccgctgccacagggccatcatcaccatctgccggctcattggcatcaaagacatgtatgccaaggtctctgggtccattaatatgctcagcctcacccagggcctcttccgtgggctctccagacaggaaacccatcaacagctggctgataagaagggcctccatgttgtggaaatccgggaggaatgtggccctctgcccattgtggttgcgtccccccgggggcccttgaggaaggatccagagccagaagatgaggttccagacgtcaaactggactgggaagatgtgaagactgcacagggaatgaagcgctctgtgtggtctaatttgaagagagccgccacgtaacctctctggccttgtgcagccagttcctgtgctgccctgcacctaggagagactcagcccctcacagcttgggatgttaccttgccttttgtttgttttgagggaagtttaatctttaaactctttggaaataaataattatagctttcaaaaaaaaaaaaaaaaaaaaaaaaaaaaaaaaaaagggcggccgctctagaggatccctcgaggggcccaagcttacgcgtgcatgcgacgtcatagctctctccctatagngagtcgnattataagctaggcacccngccgtcgttttacaacgtcgtgactgggagatctgctagcttgggatctttgggaaggaaccttacttctgtggtgtgacataattggacaaactacctacaggagatttaaagctctaagggaaaa

SEQ ID NO: 1478 - DNA, 1277 bp, Homo sapiens
acatacatctttcgacgggtcatcggtcggtgtaccgtctttggtaaagtatttcgtgccgttgtaatcgcatccagtcccgcttcggtaccagccccgcatacaccaggtgcagacaggcgtaatctgccgtgtcggcagctgcaggctctgaatatcgaaaggagagcacagctcgaaatcaacctgtacacgcgtctctgcggttttggcattgacgtaaaagagctgtacgcgctcatcggccgggctggcacccggattaccgtttttccagttggcggcatcgagatacttcgaaagcgtggtatggattttgaccttagccctgaccatatcgtcatattcaagacacagcgcggtgacatagtttccgacgttcccgacggacagcgtgggcgttggctgggaacctgtactcgataactccatccccttaagttcgtagggatggggatcgtactggtttccctgccagataatggcgggcagattttctgcggcgaaggctgcccacccctcttcctgaatattgtgcgcatgaaaacgcagcacctgatccataccgaattcagtgccgtcgatctcaatcagctgaataacgctgccgggctcaagctgttgtatgtctgccgtaaaactcatactccccccataaaaaaaagccgcccggaggcagctttcagtgtttttcgagaaaatcagggcgcgaacgcctgttcaaaagtgaaggccacagtggcttttttcccggtagggaaagaaacgctgaacgaatcggccttcattctgaacagctttttttcaccccatggagtggtccaccagaacgatttagtaacgtgagacatcaggaaagcgcgcagcgcagccgcctcctgtctggtgcccgtccagtccaggttccacgtttcctgtttgtcgttgatccccatccccgctatctgtttgtagccatccccgaactgggcctgcagcgttcgggctgtttcagtgccctgcgctgtttttcgcgtgcgccaggtaaacgtgtccgtcactgtgtcctcctcgaataaagcacgccgcccgcggacatttcttttttcagtcgctcggtgattgtctgctgaacaatcgcctgcagctgtttcgccgtccccgtggcgttcgcctgatttatgcttccgtcactcccctgctggctgatgctgactggggcataaacactaatcccgcccatgccagcaccggctgcgttcccgccgccgaccagaccacccgaggcatacccgcgc

SEQ ID NO: 1479 - DNA, 2529 bp, Homo sapiens; identical to SEQ ID NO: 589

SEQ ID NO: 1480 - DNA, 2237 bp, Homo sapiens
ccacgcgkccrgcagccccagccctcagagagacagcagaaagggagggagggagggtgctggggggacagccccccaccattcctaccgctatgggcccaacctcccactcccacctcccctccatcggccggggctaggacacccccaaatcccgtcgcccccttggcaccgacaccccgacagagacagagacacagccatccgccaccaccgctgccgcagcctggctggggagggggccagccccccaggccccctacccctctgaggtggccagaatggatttgtggccaggggcatggatgctgctgctgctgctcttcctgctgctgctcttcctgctgcccaccctgtggttctgcagccccagtgccaagtacttcttcaagatggccttctacaatggctggatcctcttcctggctgtgctcgccatccctgtgtgtgccgtgcgaggacgcaacgtcgagaacatgaagatcttgcgtctaatgctgctccacatcaaatacctgtacgggatccgagtggaggtgcgaggggctcaccacttccctccctcgcagccctatgttgttgtctccaaccaccagagctctctcgatctgcttgggatgatggaggtactgccaggccgctgtgtgcccattgccaagcgcgagctactgtgggctggctctgccgggctggcctgctggctggcaggagtcatcttcatcgaccggaagcgcacgggggatgccatcagtgtcatgtctgaggtcgcccagaccctgctcacccaggacgtgagggtctgggtgtttcctgagggaacgagaaaccacaatggctccatgctgcccttcaaacgtggcgccttccatcttgcagtgcaggcccaggttcccattgtccccatagtcatgtcctcctaccaagacttctactgcaagaaggagcgtcgcttcacctcgggacaatgtcaggtgcgggtgctgcccccagtgcccacggaagggctgacaccagatgacgtcccagctctggctgacagagtccggcactccatgctcactgttttccgggaaatctccactgatggccggggtggtggtgactatctgaagaagcctgggggcggtgggtgaaccctggctctgagctctcctcccatctgtccccatcttcctccccacacctacccacccagtgggccctgaagcagggccaaaccctcttccttgtctcccctctccccacttattctcctctttggaatcttcaacttctgaagtgaatgtggatacagcgccactcctgccccctcttggccccatccatggactcttgcctcggtgcagtctccactcttgacccccacctcctactgtcttgtctgtgggacagttgcctccccctcatctccagtgactcagcctacacaagggaggggaacattccatccccagtggagtctcttcctatgtggtcttctctacccctctaccccacattggccagtggactcatccattctttggaacaaatcccccccactccaaagtccatggattcaatggactcatccatttgtgaggaggacttctcgccctctggctggaagctgatacctgaagcactcccaggctcatcmtgggagctttcctcagcaccttcaccttccctcccagtgtagcctcctgtcagtgggggctggacccttctaattcagaggtctcatgcctgcccttgcccagatgcccagggtcgtgcactctctgggataccagttcagtctccacatttctggttttctgtccccatagtacagttcttcagtggacatgaccccacccagccccctgcagccctgctgcaccatctcaccagacacaaggggaagaagcagacatcaggtgctgcactcacttctgccccctggggagttggggaaaggaacgaaccctggctggaggggataggagggcttttaatttatttctttttctgttgaggcttccccctctctgagccagttttcatttcttcctggtggcattagccactccctgcctctcactccagacctgttcccacaactggggaggtaggctgggagcaaaaggagagggtgggacccagttttgcgtggttggtttttattaattatctggataacagcaaaaaaactgaaaataaagagagagagagaaaaaaaaaaaaaaaaaaaaaaaaaaaaaaaaaaaactcga

SEQ ID NO: 1481 - DNA, 1300 bp, Homo sapiens
  misc_feature (46)..(46): n equals a,t,g, or c
  misc_feature (86)..(86): n equals a,t,g, or c
  misc_feature (140)..(140): n equals a,t,g, or c
  misc_feature (184)..(184): n equals a,t,g, or c
  misc_feature (192)..(192): n equals a,t,g, or c
  misc_feature (211)..(211): n equals a,t,g, or c
tatccccatggtggggggcattccacaggttttgccagattttaanacctggccattaagccaccgggtagtggatttcgccagcntagatccagatattaggcccaccaaagtatgtggcttagcccgaaaccaccttnattggaagtttataggaccagcatgcctaatcattcctggttantctctggnctttggaagtcatcatatncaaagtttttcgtcacactgcagggttgaacccagaagttagttgctttgagaccataaggtcttgtgcaagaggagccctcgctcttctgttccttctcggcaccacctggatctttggggttctccatgttgtgcacgcatcagtggttacagcttacctcttcacagtcagcaatgctttccaggggatgttcatttttttattcctgtgtgttttatctagaaagattcaagaagaatattmcagattgttcaaaaatgtcccctgttgttttggatgtttaaggtaamcatagagaatggtggataattacaactgcacaaaaataaaaattccaagctgtggatgaccaatgtataaaaatgactcatcaaattatccaattattaactactagacaaaaagtattttaaatcagtttttctgtttatgctataggaactgtagataataaggtaaaattatgtatcatatagatatactatgtttttctatgtgaaatagttctgtcaaaaatagtattgcagatatttggaaagtaattggtttctcaggagtgatatcactgcacccaaggaaagattttctttctaacacgagaagtatatgaatgtcctgaaggaaaccactggcttgatatttctgtgactcgtgttgcctttgaaactagtcccctaccacctcggtaatgagctccattacagaaagtggaacataagagaatgaaggggcagaatatcaaacagtgaaaagggaatgataagatgtattttgaatgaactgttttttctgtagactagctgagaaattgttgacataaaataaagaattgaagaaacacattttaccattttgtgaattgttctgaacttaaatgtccactaaaacaacttagacttctgtttgctaaatctgtttctttttctaatattctaaaaaaaaaaaaaaggtttacctccacaaattgaaaaaaaaaaaagtgaaaaaaatctgtttctaaggttagactgagatatatactatttccttacttatttcacagattgtgactttggatagttaatcagtaaaatataaatgtgtcga

SEQ ID NO: 1482 - DNA, 2108 bp, Homo sapiens
  misc_feature (2)..(3): n equals a,t,g, or c
tnntagataccccagctcgaaattaaccctcactaaagggaacaaaagctggagctccaccgcggtggcggccgctctagaactagtggatcccccgggctgcaggaattcggcacgagggagaatggagagggggctgccgctcctctgcgccgtgctcgccctcgtcctcgccccggccggcgcttttcgcaacgataaatgtggcgatactataaaaattgaaagccccgggtaccttacatctcctggttatcctcattcttatcacccaagtgaaaaatgcgaatggctgattcaggctccggacccataccagagaattatgatcaacttcaaccctcacttcgatttggaggacagagactgcaagtatgactacgtggaagtcttcgatggagaaaatgaaaatggacattttaggggaaagttctgtggaaagatagcccctcctcctgttgtgtcttcagggccatttctttttatcaaatttgtctctgactacgaaacacatggtgcaggattttccatacgttatgaaattttcaagagaggtcctgaatgttcccagaactacacaacacctagtggagtgataaagtcccccggattccctgaaaaatatcccaacagccttgaatgcacttatattgtctttgcgccaaagatgtcagagattatcctggaatttgaaagctttgacctggagcctgactcaaatcctccaggggggatgttctgtcgctacgaccggctagaaatctgggatggattccctgatgttggccctcacattgggcgttactgtggacagaaaacaccaggtcgaatccgatcctcatcgggcattctctccatggttttttacaccgacagcgcgatagcaaaagaaggtttctcagcaaactacagtgtcttgcagagcagtgtctcagaagatttcaaatgtatggaagctctgggcatggaatcaggagaaattcattctgaccagatcacagcttcttcccagtatagcaccaactggtctgcagagcgctcccgcctgaactaccctgagaatgggtggactcccggagaggattcctaccgagagtggatacaggtagacttgggccttctgcgctttgtcacggctgtcgggacacagggcgccatttcaaaagaaaccaagaagaaatattatgtcaagacttacaagatcgacgttagctccaacggggaagactggatcaccataaaagaaggaaacaaacctgttctctttcagggaaacaccaaccctacagatgttgtggttgcagtattccccaaaccactgataactcgatttgtccgaatcaagcctgcaacttgggaaactggcatatctatgagatttgaagtatatggttgcaagataacagattatccttgctctggaatgttgggtatggtgtctggacttatttctgactcccagatcacatcatccaaccaaggggacagaaactggatgcctgaaaacatccgcctggtaaccagtcgctctggctgggcacttccacccgcacctcattcctacatcaatgagtggctccaaatagacctgggggaggagaagatcgtgaggggcatcatcattcagggtgggaagcaccgagagaacaaggtgttcatgaggaagttcaagatcgggtacagcaacaacggctcggactggaagatgatcatggatgacagcaaacgcaaggcgaagtcttttgagggcaacaacaactatgatacacctgagctgcggacttttccagctctctccacgcgattcatcaggatctaccccgagagagccactcatggcggactggggctcagaatggagctgctgggctgtgaagtggaagcccctacagctggaccgaccactcccaacgggaacttggtggatgaatgtgatgacgaccaggccaactgccacagtggaacaggtgatgacttccagctcacaggtggcaccactgtgctggccacagaaaagcccacggtcatagacagcaccatacaatcaggtatcaaataaaatacgaaatgtgacagaaaaaaaaaaaaaaaaaaaaaaaaaatcgtag

SEQ ID NO: 1483 - DNA, 3130 bp, Homo sapiens
  misc_feature (11)..(11): n equals a,t,g, or c
ttgaagttccnttaagggggactataagggawaccttcccggaattttygggtcgacccacgcgtccgtcgagggcgaaatcggaaaaggaaaccttggtgggattgctgtggatgacattagtattaataaccacatttcacaagaagattgtgcaaaaccagcagacctggataaaaagaacccagaaattaaaattgatgaaacagggagcacgccaggatacgaaggtgaaggagaaggtgacaagaacatctccaggaagccaggcaatgtgttgaagaccttagaccccatcctcatcaccatcatagccatgagygccctgggggtcctcctgggggctgtctgtggggtcgtgctgtactgtgcctgttggcataatgggatgtcagaaagaaacttgtctgccctggagaactataactttgaacttgtggatggtgtgaagttgaaaaaagacaaactgaatacacagagtacttattcggaggcatgaaggcagacagagatgaaaagacagtcaaaggacggaagtggaaggacgggagtgagctggggagctgttgatctttcactatacaggctgggaagtgtgttgatgaccactgagccaggcttttctcaggagcttcaatgagtatggccgacagacatggacaaggagctgtgttcaccatcggactcatgtgcagtcagcttttttcctgttggtttcatttgaataatcagatgctggtgttgagaccaagtatgattgacataatcattcatttcgacccctcctgcccctctctctctctctcctctcccctttgtggattctttttggaaactgagcgaaatccaagatgctggcaccaagcgtattccgtgtggccctttggatggacatgctacctgaaacccagtgcccagaatatactagaatcaccgcatttcagtggactcctgaagttgtacttgtgtataattgcccgcgtcgtgcataggcaaagaaggattaggctgttttctttttaaagtactgtagcctcagtactggtgtagtgtgtcagctctgtttacgaagcaatactgtccagttttcttgctgtttttccggtgttgtactaaacctcgtgcttgtgaactccatacagaaaacggtgccatccctgaacacggctggccactgggtatactgctgacaaccgcaacaacaaaaacacaaatccttggcactggctagtctatgtcctctcaagtgcctttttgtttgtactggttcattgtgttacattaacgacccactctgcttcttgctggtgaaagccctgctctttaatcaaactctggtggcccactgactaagaagaaagtttattttcgtgtgagatgccagcccctccgggcaggcaagggctctgaagatttggcaacgtggcttaattgttctgctttttctgtagttcaatttcatgtttcttgacccttttgtataaagctrcaatattctctcttattgttctttcatatggaatgtattttcaaatgtaaactctcttctctttctctctcctatctctctgtcttttttctctcttagaattggaggatttgccattgtccaggaaagaaacttgcagctttaacctgctgggaatggcaaacgattttactagactttatgtttaaaaataaataaataagggaaattcctaactttgccctccaaagtctaactttggttttcttgttaactggttaaagtgacagtatcttttttccttatctattctattcaaaatgacctttgatagaaatgttggcatttagtagaaatagtgataagttgaggaaagaaataatacaaattggctttcaagtgagacccaaaggaagaactggataaaatcttccaaatccaaaagcatgagatttttctatccaaatatgcaaaaatgacccaagagaactttcttattttgctactgagtcacacaagggaagtggaaggaagaacagttaatttaagaatgaaactataaatcctgatgcctgggggtcaagtattttaagataagagggggaaaaacacataaagtcaaacaaatgttttaaaaattcataacagcaaccttgaaaaaatagacttaaatgaatgcttctagaaacttccagcggctcacaaagaataagcctgccttagggctggcaacatctaagcctctaacagcacagggaagcaaatatcttaccaggcagcctatgaattaacccaaagaagctttggttggttttggtggatttttatcatgccatgttggacatgagattttttagatcttccttcccacattgctagacgtctcactcaaagacatttgttgggagtcacatttgcatcatagatgagacagtccattcatcttagttaaattggattgagaatgccttttgtttccaggaaaatattgatcaccatgaaagaagaatagttttttgtccccagagacattcatttagttgatataatcctaccagaaggaaagcactaagaaacactcgtttgttgtttttaaaggcaacagacttaaagttgtcctcagccaaggaaaaatgatactgcaactttaaaatttaaagtatcttgcactgataaatatatttaaaaattatatgtttataaagttattaatttgtaaaggcagtgttacaaaatgttcagtttatattgttttagattgttttgtaatttttaaaggtgtaaaataacatattttttctttatggaaatctataaaactttctgtagtaaaatgttttcattttactggtatattattgcttcatgttttgtaccatcataagattttgtgcagattttttttacagaaattattattttctatgacaatatgacacttgtaaattgttgtttcaaaatgaacagcgaagccttaactttaaatgacatttgtattctcagacactgagtagcataaaaaccacatagaactgaactgtaacttaaattccaaactatgactactacattccaaagaaacagttgaattaaacattttcataaaataaaaaaaaaaaaaaaaaagggcggccgctctagaggatcccgcgaggggcccaa

SEQ ID NO: 1484 - DNA, 4762 bp, Homo sapiens; identical to SEQ ID NO: 1379
  misc_feature (4747)..(4747): n equals a,t,g, or c
  misc_feature (4751)..(4751): n equals a,t,g, or c

SEQ ID NO: 1485 - DNA, 1139 bp, Homo sapiens
  misc_feature (2)..(2): n equals a,t,g, or c
  misc_feature (16)..(16): n equals a,t,g, or c
  misc_feature (18)..(18): n equals a,t,g, or c
  misc_feature (1088)..(1088): n equals a,t,g, or c
  misc_feature (1093)..(1093): n equals a,t,g, or c
  misc_feature (1102)..(1102): n equals a,t,g, or c
  misc_feature (1113)..(1113): n equals a,t,g, or c
ancgaaattcttcacntncccagatttactcatggcggacccggggctcagaatggagctgctgggctgtgaagtggaagcccctacagctggaccgaccactcccaacgggaacttggtggatgaatgtgatgacgaccaggccaactgccacagtggaacaggtgatgacttccagctcacaggtggcaccactgtgctggccacagaaaagcccacggtcatagacagcaccatacaatcagagtttccaacatatggttttaactgtgaatttggctggggctctcacaagaccttctgccactgggaacatgacaatcacgtgcagctcaagtggagtgtgttgaccagcaagacgggacccattcaggatcacacagcaggagatggcaacttcatctattcccaagctgacgaaaatcagaagggcaaagtggctcgcctggtgagccctgtggtttattcccagaactctgcccactgcatgaccttctggtatcacatgtctgggtcccacatcggcacactcagggtcaaactgcgctaccagaagccagaggagtacgatcagctggtctggatggccattggacaccaaggtgaccactggaaggaagggcgtgtcttgctccacaagtctctgaaactttatcaggtgattttcgagggcgaaatcggaaaaggaaaccttggtgggattgctgtggatgacattagtattaataaccacatttcacaagaagattgtgcaaaaccagcagacctggataaaaagaacccagaaattaaaattgatgaaacagggagcacgccaggatacgaaggtgaaggagaaggtgacaagaacatctccaggaagccaggcaatgtgttgaagaccttagaccccatcctcatcaccatcatagccatgagtgccctgggggtcctcctgggggctgtctgtggggtcgtgctgtactgtgcctgttggcataatgggatgtcagaaagaaacttgtctgccctggagaactataactttgaacttgtggatggtgtgaagttgaaaaaagaccaactgaatacacagagtacttattcgnaggcntgaaggcanacagagatganaagacagtcaaaggacggaagtggaa

SEQ ID NO: 1486 - DNA, 923 bp, Homo sapiens
  misc_feature (714)..(714): n equals a,t,g, or c
  misc_feature (814)..(814): n equals a,t,g, or c
  misc_feature (867)..(867): n equals a,t,g, or c
  misc_feature (922)..(922): n equals a,t,g, or c
tcgacccacgcgtccgagaagatggagcccggcgccgcggcccgcgcttggtctctcctgtggctgctgctgcccttgcttggtccggcctgcgccagcggtcctcgcaccttagtgctgctggacaacctcaacctgcgggagacgcactcgcttttcttccgaagcctgaaggacagggcctttgaactcacattcaagaccgcagatgacccgagcctgtccctcattaagtacggggagttcctctacgacaatctcatcatcttctccccctcggtagaagatttcggaggcaacatcaatgtggagactatcagtacctttatcgacggtggaggcagtgtcctggtggctgctagctcagacattggtgatcctcttcgagagctgggcagtgagtgtgggattgagttcgacgaggagaaaacggctgtcattgaccatcacaactatgacatctcagaccttggccagcatacgctcattgtggctgaccctgagaacctgttgaaggccccaaccattgtcgggagatcatctctgaaccccatcctctttcgaggggtcgggatggtggccgaccctgacaatcccctggtattggacatcctgacgggctcttccacctcttactccttcttcccggataaacctatcacccagtacccccatgcagtggggaagaacaccctgctcattgccgggctccangccaggaacaacgcccgggtgatcttcagcggctccctggacttcttcagtgacgccttcttcaactcagcagtgcagaaaggccgcgcccggctcccanaagtactcccaaaacgggcaactatgaatttagcttgtggccctgtcccgctngggtgttcaaggaagaaaggggtcctcccgcgttggggcctgtgtcccaccatcna

SEQ ID NO: 1487 - DNA, 559 bp, Homo sapiens
ggcggcatttcctggtgtctgagcctggcgcggaggctatgggcagccaggaggtgctgggccacgcggcccggctggcctcctccggtctcctcctgcaggtgttgtttcggttgatcacctttgtcttgaatgcatttattcttcgcttcctgtcaaaggaaatcgttggcgtagtaaatgtaagactaacgctgctttactcaaccaccctcttcctggccagagaggccttccgcagagcatgtctcagtgggggcacccagcgagactggagccagaccctcaacctgctgtggctaacagtccccctgggtgtgttttggtccttattcctgggctggatctggttgcagctgcttgaagtgcctgatcctaatgttgtccctcactatgcaactggagtggtgctgtttggtctctcggcagtggtggagcttctaggagagcccttttgggtcttggcacaagcacatatgtttgtgaagctcaaggtgattgcagagagcctgtcggtaattcttaagagcgttctgacagctttyctcgtgctgtggtt

SEQ ID NO: 1488 - DNA, 687 bp, Homo sapiens
actagccagctctgtgcttctcctgctaaacattccaaaattatgatgatactgtgaaggtactcttaggaaaatattcctaaatcagactgagtaccagattagctcattttgagatattgtgcataaactgtattttactaaatttcttctaagacaagcaagaggctgaactagcttgctattctaagaaaagtcagacattttcagtggttttggaaaaagtgaagctcctacaacaaaatactcctagattaaaatctcttsttctgtatttaccaacccgagtatacagaatcttacagtcagagtgtagctctgggcatgtcccagttgtaagaagcttaaataattggtgtggtgagcgaaagccaacaaccattcctctcctccctatgcccttgattagcctggctccaacttctgcatcctttggctcttgagactctgaggataagggaagcattcttatgcctaagactagcccatggctgggcatctgcagggcaatggggacagctttagagtcctgagagggctggatcaagagtaaggtcacatggccaggtatgggggctcacacctgtaatcctagcactttgggaggctgaggtgggcagactgcctgaggtcaggagttcaagagcagcctggccaacatggcaaaaccccatctctactaaaaat

SEQ ID NO: 1489 - DNA, 382 bp, Homo sapiens
ctttaatgaaaatattaaataattttaatagtgctataaaaattaaaatagaaaaaccaacatgattgttgtttcttcttttttgttttgtaggtgtgtatgatatagtgaataatcttggctcccttgtggccagattaattttccagccaatagaggaaagtttttatatattttttgctaaggtgctggagaggggaaaggatgccacacttcagaagcaggtaatgttggttcttatgtcatctctcaagtgaattctccctttaattgcaagacagacaggagtgtgaagcagtctgkttctcttctgtttgatcaggaattttcttatagatttcattcttctattacattcttcatgatagtgggacccagggct

SEQ ID NO: 1490 - DNA, 1230 bp, Homo sapiens; identical to SEQ ID NO: 1002
  misc_feature (1140)..(1140): n equals a,t,g, or c
  misc_feature (1146)..(1146): n equals a,t,g, or c
  misc_feature (1213)..(1213): n equals a,t,g, or c
  misc_feature (1219)..(1219): n equals a,t,g, or c

SEQ ID NO: 1491 - DNA, 2541 bp, Homo sapiens; identical to SEQ ID NO: 506

SEQ ID NO: 1492 - DNA, 833 bp, Homo sapiens
ctgtgacttacgtgtctgtcaccggcaggcagccctacaaatcctggtgacctgctctcscamsaacagagcctgtccccagatgtcccagtagcgatgagtaacagaggtggctgtggacttcctctacttctccttgctggatcagggccttcctgcctcccgctgggcaggtctggccttgctctcttggcagggccccagcccctctgaccactctgcagctcaccatgcagctgatgccaaagttgtggtgtccagtgtgcagcagccctgggagccactgccaccttcagaggggttccttgctgagacccacattgcttcacctggccccaccatggctgcttgcctggcccaacctagcgttctgtgccatgctagagcttgagctgttgctcttcttcaggggaggaaatagggtggagagcgggaagggtcttgctcctaagtgttgctgctgtggcttttttgccttctccaaagacgcactgccaggtcccaagcttcagactgctgtgcttagtaagcaagtgagaagcctggggtttggagcccayctactctctggcagcatcagcatcctactcctggcaacatcaggccaacgtccaccccagcctcacattgccagatgttggcagaagggctaatattgaccgtcttgactggctggagccttcaaagccactgggatgtcctccaggcacctgggtcccatgaccagctccccgtctccataggggtaggcatttcactggtttatgaagctcgagtttcattaaatatgttaagaatcaaaaaaaaaaaaaaaaaaaaaaaaaagggcggcc

SEQ ID NO: 1493 - DNA, 1178 bp, Homo sapiens
  misc_feature (1132)..(1132): n equals a,t,g, or c
  misc_feature (1151)..(1151): n equals a,t,g, or c
  misc_feature (1160)..(1160): n equals a,t,g, or c
  misc_feature (1163)..(1163): n equals a,t,g, or c
  misc_feature (1167)..(1167): n equals a,t,g, or c
gagtagaggagctgttctctgtgtcaatgggcaatggggatagtcagtctagtgaacatgktstwakgaaccttttgtcttcctgatgagttcttctatggtgtcccactgctccttggtgacctttctcaggtcgttgaattcccctgaaataagtacttcctctccaccgtcaaatttaatgactgctccattaatccaagaagcataatcactacaaaggaaagcagcaagatttgcgagttcttctacagtccccaggcgaccacagggaattctgccaatcatttctttctcaaatgttccagttgggtccagacggctaaaggcacctttggtttttataggccctggttgaatcacattgaatcgcattccatatttaccccattcagctgcaagagacttgctcatggcttccacacctgctttggcagaagcacttggtactacaaaacctgaaccagtctcagcatagatagtagtaatagaaagaaatgctgctcctttctgtgctttaattagttgttttccaatttctagtgtcacgaaggctgtgccatttagaactatgtcagttatggttttccaagcattaggagaaagtctttcagtaggagaaataaaattccctgctgcattgtttatcacaatattaggatgtcctgcaactttgatcagttctgacacagtgttttgaaccatatcaggatccctcacatcacactgaattgcatgaaccttatttccagtttgagaagaaatttgttctgcggtagctttcaaaacatccatcttccggctggctatcacgcactgagcacctaggctggacagaagagttgtcattcctttaccaaggccagtacctcccccagtaatgaatgccacttttccttgaaaactattaggtggtagcatcgctttttgaagaggtgaaaagaatttagattgcaaagcttcagtgttttgatataatatttttgtcccataactgaaaaactaaaaggggaaaatgaatttaaatttgcatacatatatttccaaaaaacagatgaattttttaaaacatgctcttgaatttaatagtaatcaaattcttgtattaacacaaactcactgcaaacatatnggtattgtacttatttttngctggcttntanatanagccccccccc

SEQ ID NO: 1494 - DNA, 491 bp, Homo sapiens
aaaccaaaacaaaacacaacaatttaatttaagcaaaacacctgcagctaataatggtagcatttgtagtgcttactatgtgctacacactgctctaggtgctttacctgtaataactcatataatcctcacaatgccatatgaagaaatttattttattgtccccattttgtagatgaaggaactgaggcacagagaggtcaaataacctgctgaaagttacatagcttgggagaaaattctgtgctatgtagtccagctccagagcctgtgctttttaaatcagaaaacaaagartaataattaagtacaataccatatgtttgcagtgagtttgtgttaatacaagaatttgattactattaaawtcaagagctgttttaaaaaattcactgttttttgggaatatawgtatgcaatttaaawtcatttcccctttagttttcagttagggamaaaatattaatatccaaaacactgggagcctttgg

SEQ ID NO: 1495 - DNA, 1040 bp, Homo sapiens
  misc_feature (13)..(13): n equals a,t,g, or c
  misc_feature (23)..(23): n equals a,t,g, or c
  misc_feature (26)..(26): n equals a,t,g, or c
  misc_feature (656)..(656): n equals a,t,g, or c
cttgggcccctcnagggatcctntanaacggccgcccttttttttttttttttttttttttttttttttttttttttttttttttttktttgttaattaagaatttattagacttgaaatagtcaaaagatgagagataatttgtttcatttctattcccttttctgtaaccaagatgaaggccaaagtggtcttaggaaccttttgtcttcctgatgagttcttctatggtgtcccactgctccttggtgacctttctcaggtcgttgaattcccctgaaataagtacttcctctccaccgtcaaatttaatgactgctccattaatccaagaagcataatcactacaaaggaaagcagcaagatttgcgagttcttctacagtccccaggcgaccacagggaattctgccaatcatttctttctcaaatgttccagttgggtccagacggctaaaggcacctttggtttttataggccctggttgaatcacattgaatcgcattccatatttaccccattcagctgcaagagacttgctcatggcttccacacctgctttggcagaagcacttggtactacaaaacctgaaccagtctcagcatagatagtagtaatagaaagaaatgctgctcctttctgtgctttaattagntgttttccaatttctagtgtcacgaaggctgtgccatttagaactatgtcagttatggttttccaagcattaggagaaagtctttcagtaggagaaataaaattccctgctgcattgtttatcacaatattaggatgtcctgcaactttgatcagttctgacacagtgttttgaaccatatcaggatccctcacatcacactgaattgcatgaaccttatttccagtttgagaagaaatttgttctgcggtagctttcaaaacatccatcttccggctggctatcacgcactgagcacctaggcctccgaggagcgaggccacagggcagccgggaccccagagtaaagaaaaccctggccggtagcttcrtgttgagtctccc

SEQ ID NO: 1496 - DNA, 1906 bp, Homo sapiens
  misc_feature (1900)..(1900): n equals a,t,g, or c
  misc_feature (1902)..(1902): n equals a,t,g, or c
gcaggttgagatgtgtataagagacaggggtaatggctgaggggcgagaactgatcctggacctggagaagaatgagcaactttttgctccttcctacacagaaacccattatacttcaagtggtaaccctcaaaccaccacacggaaattggaggatcactgcttttaccacggcacggtgagggagacagaactgtccagcgtcacgctcagcacttgccgaggaattagaggactgattacggtgagcagcaacctcagctacgtcatcgagcccctccctgacagcaagggccaacaccttatttacagatctgaacatctcaagccgcccccgggaaactgtgggttcgagcactccaagcccaccaccagggactgggctcttcagtttacacaacagaccaagaagcgacctcgcaggatgaaaagggaagatttaaactccatgaagtatgtggagctttacctcgtggctgattatttagagtttcagaagaatcgacgagaccaggacgccaccaaacacaagctcatagagatcgccaactatgttgataagttttaccgatccttgaacatccggattgctctcgtgggcttggaagtgtggacccacgggaacatgtgtgaagtttcagagaatccatattctaccctctggtcctttctcagttggaggcgcaagctgcttgcccagaagtaccatgacaacgcccaattaatcacgggcatgtccttccacggcaccaccatcggcctggcccccctcatggccatgtgctctgtgtaccagtctggaggagtcaacatggaccactccgagaatgccattggcgtggctgccaccatggcccacgagatgggccacaactttggcatgacccatgattctgcagattgctgctcggccagtgcggctgatggtgggtgcatcatggcagctgccactgggcacccctttcccaaagtgttcaatggatgcaacaggagggagctggacaggtatctgcagtcaggtggtggaatgtgtctctccaacatgccagacaccaggatgttgtatggaggccggaggtgtgggaacgggtatctggaagatggggaagagtgtgactgtggagaagaagaggaatgtaacaacccctgctgcaatgcctctaattgtaccctgaggccgggggcggagtgtgctcacggctcctgctgccaccagtgtaagctgttggctcctgggaccctgtgccgcgagcaggccaggcagtgtgacctcccggagttctgtacgggcaagtctccccactgccctaccaacttctaccagatggatggtaccccctgtgagggcggccaggcctactgctacaacggcatgtgcctcacctaccaggagcagtgccagcagctgtggggacccggagcccgacctgcccctgacctctgcttcgagaaggtgaatgtggcaggagacacctttggaaactgtggaaaggacatgaatggtgaacacaggaagtgcaacatgagagatgcgaagtgtgggaagatccagtgtcagagctctgaggcccggcccctggagtccaacgcggtgcccattgacaccactatcatcatgaatgggaggcagatccagtgccggggcacccacgtctaccgaggtcctgaggaggagggtgacatgctggacccagggctggtgatgactggaaccaagtgtggctacaaccatatttgctttgaggggcagtgcaggaacacctccttctttgaaactgaaggctgtgggaagaagtgcaatggccatggggtctgtaacaacaaccagaactgccactgcctgccgggcttgggcccggccttcttcaacacaccgggccaacggggcagtatcgacantnggct

SEQ ID NO: 1497 - DNA, 789 bp, Homo sapiens
gcgtgtgagcgccgagcgctaagggccgccgccaccatgccagggggcgcaggcgccgcccggctctgcttgctggcgtttgccctgcagcccctccggccgcgggcggcgcgggagcctggatggacaagaggaagtgaggaaggcagccccaagctgcagcatgaacttatcatacctcagtggaagacttcagaaagccccgtgagagaaaagcatccactcaaagctgagctcagggtaatggctgaggggcgagaactgatcctggacctggagaagaatgagcaactttttgctccttcctacacagaaacccattatacttcaagtggtaaccctcaaaccaccacacggaaattggaggatcactgcttttaccacggcacggtgagggagacagaactgtccagcgtcacgctcagcacttgccgaggaattagaggactgattacggtgagcagcaacctcagctacgtcatcgagcccctycctgacagcaagggccaacaccttatttacagatctgaacatctcaagccgsccccgggaaactgtgggttcgagcactycaagcccamcamcarggactgggctcttcagtttacacaacagamcaagaagcgamctcgcargatgaaaagggaagatttaaactccatgaartatgkggagctttacctcgtggctgattatttagagtttcagaagaatcgacgagaccaggacgccaccaaacacaagctcatagagctgtctcttatacacatctcaacctgggggggtttg

SEQ ID NO: 1498 - DNA, 1029 bp, Homo sapiens
  misc_feature (21)..(21): n equals a,t,g, or c
  misc_feature (62)..(62): n equals a,t,g, or c
  misc_feature (76)..(76): n equals a,t,g, or c
ccttattgattaaagaagaangtcccagttccccattcaaccctcmagaattgaggaattcnggatagacttcctnggaagaarcggcatttaggagcagatcttgaggatgagcagaagktggccccaccaaggagagaaggagcgtatcaggcagaacaagcagcatttacaaagacctagcaggcagacgagcatgggggaactgacagaagttaatatggggtggaaggtgggtagtggcttgtcataaaataggccaacccgggagaaaatgccacatggtttaggagcttcttagagagtctatttccccacgttcgttgctctaacctgctgtgcgcccccgtattgactgaattgcagaaaaggcagtcagctcatgaccccacaagtttcaccttccccacctttgccattacccattgaaagtggccttaaaagcaatgttcccagcccaaggttgctgattatccacttacctgggaaacgatgcaatttggtgcggggggaattggccggcttggaggaggcctcctggacgactccgtcctctctatttgagacccgggccctggggagttcctagcagccctgctcaggtgagctggcagtggtgcaggtggggacccaccacgcagataatctggagggggccggggaggaggctgggagggcttccgcaggatttccggagtgttgatcacctgtacgcacaagtcaaggaacacctgagacaagaaatcactcagggctggccttgtgtgtctctttgagataaaccagagcccaaagggagaacagacacaccaatctattaaacccctgaggatcccagaagtcagatgcaacctttaaagtcattaggggatgtcagaaccaaataacatgtctctccagccaataaaagggcttttattaccaatcccatgggcccacagaggctcttagaaaaacacagcatggcggccggcatggtggctcatgcctgtaatcccagcattttgggaggccgaggcgggtggatcc

SEQ ID NO: 1499 - DNA, 413 bp, Homo sapiens
  misc_feature (363)..(363): n equals a,t,g, or c
  misc_feature (411)..(413): n equals a,t,g, or c
gagacagtcttggtgctggcggtcctcatgctgatgtactactgctgcagacagaacaacaaactaggccaactcaagccctcagctctcccttccaagctgaggcaacagttcagttgtcccttcagggtttctcagaacagcgggactggtcatgccaacccaactttcaagctgcagacgccccagggcaagcgaaaggtgatcaacactccggaaatcctgcggaagccctcccagcctcctccccggccccctccagattatctgcgtggtgggtccccacctgcaccactgccagctcacctgagcagggctgctaggaactccccagggcccgggtctcaaatagagaggacggantcgtccaggaggcctcctccaagccggccaattccccccccttttttnnn

SEQ ID NO: 1500 - DNA, 2020 bp, Homo sapiens
  misc_feature (2010)..(2010): n equals a,t,g, or c
  misc_feature (2019)..(2019): n equals a,t,g, or c
gggaagggtttggtgaagggggcaagagcccagagctccccggcgtccaggaagacgaggctgcatcctgagcccctgcatgcacccagggccacccggcagcacactcatcccgcgcctccagaggcccacccctcatgcaacagccgcccccgcaggcagggggctggggactgcagccccactcccgcccctcccccatcgtgctgcatgacctccacgcacgcacgtccagggacagactggaatgtatgtcatttggggtcttgggggcagggctcccacgaggccatcctcctcttcttggmcctccttggcctgacccattctgtggggaaaccgggtgcccatggagcctcagaaatgccacccggctggttggcatggcctggggcaggaggcagaggcaggagaccaagatggcaggtggaggccaggcttaccacaacggaagagacctcccgctggggccgggcaggcctggctcagctgccacaggcatatggtggagaggggggtaccctgcccaccttggggtggtggcaccagagctcttgtctattcagacgctggtatgggggctcggacccctcactggggacagggccagtgttggagaattctgattccttttttgttgtcttttacttttgtttttaacctgggggttcggggagaggccctgcttgggaacatctcacgagctttcctacatcttccgtggttcccagcacagcccaagattatttggcagccaagtggatggaactaactttcctggactgtgtttcgcattcggcgttatctggaaagtggactgaacggaatcaagctctgagcagaggcctgaagcggaagcaccacatcgtccctgcccatctcactctctcccttgatgatgcccctagagctgaggctggagaagacaccagggctgactttgacygagggccatggacgcgacaggcctgtggccctgcgcatgctgaaataactggaacccagcctctcctcctacaccggcctacccatctgggcccaagagctgcactcacactcctacaacgaaggacaaactgtccaggtcggagggatcacgagacacagaacctggaggggtgtgcacgctggcargtggcctctgcggcaattgcctcaccctgaggacatcagcagtcagcctgctcagagcgggggtgctggagcgcgtgcagacacagctcttccggagcagccttcaccttctctctgggatcagtgtccggctggccgacgtggcatttgctgaccgaatgctcatagaggttgacccccacagggtcacgcaggactcggacactgccctggaaacatggatggacaagggcttttggccacaggtgtgggtgtcctgttggaggagggcttgtttggagaagggaggctggctgggggagaaacccggatcccgctgcatctccgcgcctgtgggtgcatgtcgcgtgctcatctgttgcacacagctcactcgtatgtcctgcactggtacatgcatctgtaatacagtttctacgtctatttaaggctaggagccgaatgtgccccattgtcagtgggtccacgtttctccccggctcctctgggctaaggcagtgtggcccgaggcttaaaaagttactcggtactgtttttaagaacacttttatagagttagtggaaggcaagttaagagccaatcactgatccccaagtgtttcttgagcatctggtctggggggaccactttgatcggacccacccttggaaagctcaggggtaggcccaggtgggatgctcaccctgtcactgagggttttggttggcatcgttgtttttgaatgtagcacaagcgatgagcaaactctataagagtgttttaaaaattaacttcccaggaagtgagttaaaaacaataaaagccctttcttgagttaaaaagaaaaaaaaaaaaaaaaaaaaacccgggggggggcccggtaccaaattcgcccnaaagggggnc

SEQ ID NO: 1501 - DNA, 2954 bp, Homo sapiens; identical to SEQ ID NO: 334
  misc_feature (8)..(8): n equals a,t,g, or c

SEQ ID NO: 1502 - DNA, 2312 bp, Homo sapiens
  misc_feature (2312)..(2312): n equals a,t,g, or c
gcccttgtaggtgacactatagaaggtacgcctgcaggtaccggtccggaattcccgggtcgacccacgcgkscgggggctgaggggctgccatggcggcggcgggccggctcccgagctcctgggccctcttctcgccgctcctcgcagggcttgcactactgggagtcgggccggtcccagcgcgggcgctgcacaacgtcacggccgagctctttggggccgaggcctggggcacccttgcggctttcggggacctcaactccgacaagcagacggatctcttcgtgctgcgggaaagaaatgacttaatcgtctttttggcagaccagaatgcaccctattttaaacccaaagtaaaggtatctttcaagaatcacagtgcattgataacaagtgtagtccctggggattatgatggagattctcaaatggatgtccttctgacatatcttcccaaaaattatgccaagagtgaattaggagctgttatcttctggggacaaaatcaaacattagatcctaacaatatgaccatactcaataggacttttcaagatgagccactaattatggatttcaatggtgatctaattcctgatatttttggtatcacaaatgaatccaaccagccacagatactattaggagggaatttatcatggcatccagcattgaccactacaagtaaaatgcgaattccacattctcatgcatttattgatctgactgaagattttacagcagatttattcctgacgacattgaatgccaccactagtaccttccagtttgaaatatgggaaaatttggatggaaacttctctgtcagtactatattggaaaaacctcaaaatatgatggtggttggacagtcagcatttgcagactttgatggagatggacacatggatcatttactgccaggctgtgaagataaaaattgccaaaagagtaccatctacttagtgagatctgggatgaagcagtgggttccagtcctacaagatttcagcaataagggcacactctggggctttgtgccatttgtggatgaacagcaaccaactgaaataccaattccaattacccttcatattggagactacaatatggatggctatccagacgctctggtcatactaaagaacacatctggaagcaaccagcaggcctttttactggagaacgtcccttgtaataatgcaagctgtgaagaggcgcgtcgaatgtttaaagtctactgggagctgacagacctaaatcaaattaaggatgccatggttgccaccttctttgacatttacgaagatggaatcttggacattgtagtgctaagtaaaggatatacaaagaatgattttgccattcatacactaaaaaataactttgaagcagatgcttattttgttaaagttattgttcttagtggtctgtgttctaatgactgtcctcgtaagataacaccctttggagtgaatcaacctggaccttatatcatgtatacaactgtagatgcaaatgggtatctgaaaaatggatcagctggccaactcagccaatccgcacatttagctctccaactaccatacaacgtgcttggtttaggtcggagcgcaaattttcttgaccatctctacgttggtattccccgtccatctggagaaaaatctatacgaaaacaagagtggactgcaatcattccaaattcccagctaattgtcattccataccctcacaatgtccctcgaagttggagtgccaaactgtatcttacaccaagtaatattgttctgcttactgctatagctctcatcggtgtctgtgttttcatcttggcaataattggcattttacattggcaggaaaagaaagcagatgatagagaaaaacgacaagaagcccaccggtttcattttgatgctatgtgacttgcctttaatattacataatggaatggctgttcacttgattagttgaaacacaaattctggcttgaaaaaataggggagattaaatattatttataaatgatgtatcccatggtaattattggaaagtattcaaataaatatggtttgaatatgtcacaaggtctttttttttaaagcactttgtatataaaaatttgggttctctattctgtagtgctgtacatttttgttcctttgtggaatgtgttgcatgtactccagtgtttgtgtatttataatcttatttgcatcatgatgatggaaaaagttgtgtaaataaaaataattaaatgagcaggaaaaaaaaaaaaaaaaaaaaaaaaaaaaaaaacaaaaaan

SEQ ID NO: 1503 - DNA, 2223 bp, Homo sapiens
ccacgcgtccggccatggcggcggcgggccggctcccgagctcctgggccctcttctcgccgctcctcgcagggcttgcactactgggagtcgggccggtcccagcgcgggcgctgcacaacgtcacggccgagctctttggggccgaggcctggggcacccttgcggctttcggggacctcaactccgacaagcagacggatctcttcgtgctgcgggaaagaaatgacttaatcgtctttttggcagaccagaatgcaccctattttaaacccaaagtaaaggtatctttcaagaatcacagtgcattgataacaagtgtagtccctggggattatgatggagattctcaaatggatgtccttctgacatatcttcccaaaaattatgccaagagtgaattaggagctgttatcttctggggacaaaatcaaacattagatcctaacaatatgaccatactcaataggacttttcaagatgagccactaattatggatttcaatggtgatctaattcctgatatttttggtatcacaaatgaatccaaccagccacagatactattaggagggaatttatcatggcatccagcattgaccactacaagtaaaatgcgaattccacattctcatgcatttattgatctgactgaagattttacagcagatttattcctgacgacattgaatgccaccactagtaccttccagtttgaaatatgggaaaatttggatggaaacttctctgtcagtactatattggaaaaacctcaaaatatgatggtggttggacagtcagcatttgcagactttgatggagatggacacatggatcatttactgccaggctgtgaagataaaaattgccaaaagagtaccatctacttagtgagatctgggatgaagcagtgggttccagtcctacaagatttcagcaataagggcacactctggggctttgtgccatttgtggatgaacagcaaccaactgaaataccaattccaattacccttcatattggagactacaatatggatggctatccagacgctctggtcatactaaagaacacatctggaagcaaccagcaggcctttttactggagaacgtcccttgtaataatgcaagctgtgaagaggcgcgtcgaatgtttaaagtctactgggagctgacagacctaaatcaaattaaggatgccatggttgccaccttctttgacatttacgaagatggaatcttggacattgtagtgctaagtaaaggatatacaaagaatgattttgccattcatacactaaaaaataactttgaagcagatgcttattttgttaaagttattgttcttagtggtctgtgttctaatgactgtcctcgtaagataacaccctttggagtgaatcaacctggaccttatatcatgtatacaactgtagatgcaaatgggtatctgaaaaatggatcagctggccaactcagccaatccgcacatttagctctccaactaccatacaacgtgcttggtttaggtcggagcgcaaattttcttgaccatctctacgttggtattccccgtccatctggagaaaaatctatacgaaaacaagagtggactgcaatcattccaaattcccagctaattgtcattccataccctcacaatgtccctcgaagttggagtgccaaactgtatcttacaccaagtaatattgttctgcttactgctatagctctcatcggtgtctgtgttttcatcttggcaataattggcattttacattggcaggaaaagaaagcagatgatagagaaaaacgacaagaagcccaccggtttcattttgatgctatgtgacttgcctttaatattacataatggaatggctgttcacttgattagttgaaacacaaattctggcttgaaaaaataggggagattaaatattatttataaatgatgtatcccatggtaattattggaaagtattcaaataaatatggtttgaatatgtcacaaggtctttttttttaaagcactttgtatataaaaatttgggttctctattctgtagtgctgtacatttttgttcctttgtggaatgtgttgcatgtactccagtgtttgtgtatttataatcttatttgcatcatgatgatggaaaaagttgtgtaaataaaaataattaaatgagcaggaaaaaaaaaaaaaaaaaaaaaaaaaaaaa

SEQ ID NO: 1504 - DNA, 573 bp, Homo sapiens
  misc_feature (34)..(34): n equals a,t,g, or c
atcagtcattggatttagggcccaccctmatccnatatgacctcatcttaacttgattacatctgtaaaaaccttattttcaaataaggtcacattgacaggtacttggggttaggacttgcgcttttctttttgggtgacacagcttagcccagcactaactgtgtcaccaggactgtcgcttgaggcaggaatgaagcacatcctgtttgtaagctgtcttgtgccatgcggctgctccgtacaagaattgttaggaattgatgcagtggaattttgcatacagtttttcctctcttcagaaacaactttggagaagtaaaggctgaatagcaatacacaagcaccttattttattttattttagatcagggcacgtgtacatgtttgtcacatgggaatatgtgcactggtggggactgggcttccggtatcgcatggagagggactctttctgcgctcccccgcccccgsctccctactgtaaatgcccggtgctgctctctccacttcgtgtccaggggcacccatgtttagctcccacttataagtgagaacatcatatttgatttc

SEQ ID NO: 1505 - DNA, 120 bp, Homo sapiens
  misc_feature (11)..(11): n equals a,t,g, or c
gggggggcttntttttattctttgcctatttgctgcagcaatacacaagctccttatttttatttatttattwatttatttttgttgtttgtttgtttgttttgaagacggagtctggct

SEQ ID NO: 1506 - DNA, 693 bp, Homo sapiens
  misc_feature (619)..(619): n equals a,t,g, or c
  misc_feature (630)..(630): n equals a,t,g, or c
  misc_feature (664)..(664): n equals a,t,g, or c
  misc_feature (687)..(687): n equals a,t,g, or c
aagaggctcagggctgtgggaggcacatttttctctgaaaagcagtttggatgaggaagagatttggcagttggaagagagaagaagtcactacagggtactgaggaaaagctttgcygaaattggagatcaaataccagctctgccagtaagaagttgcatctcccagtgaaatgctgctgctgccatttcaactgttagctgttctctttcctggtggtaacagtgaacatggtaagagtcactctggcagctcccagcactggtgcaggggtttggattttaaaaagcaagcagggctttcctaggtgcaattggacactaagggtctgggtctttctgtctcccgccctcttcaaccattctggtggttgggactagaacctgaagccttaargcagtcaaatgtgtcagacttcctgtgktctttagactctaggtycttgttttctaaatcawtttcawtcccatycttcctaawtgtctcctgcctctctctttatcttcaccatcttgcttttccactcttcacagccttccagggccgacctcctttgcatgttatccagacctcgtcctttaccaatagtacctgggcacaaactgcaaggctccaggnggttggatganttgcagatgcaggctgggatagcgactcaggcangccatatgccggaagcctggttncaaagg

SEQ ID NO: 1507 - DNA, 895 bp, Homo sapiens
  misc_feature (55)..(55): n equals a,t,g, or c
  misc_feature (64)..(64): n equals a,t,g, or c
  misc_feature (80)..(80): n equals a,t,g, or c
  misc_feature (98)..(98): n equals a,t,g, or c
  misc_feature (556)..(556): n equals a,t,g, or c
tccccaagccgtaggcgtggcacaccacttcccgcccgtcggccgtcttctccancatcgaccnttcccagaactcgggnaggcatgggggagagctnccagggaggtgaagaactcctctgccacccggaacatgtgcgtggcgttccagccctgctgcagcatagtactggtgacatcgaggttgggcttgtctgggaaaggcaccaccatgtcgtagatgttttcccagctctgggcccacatgtctcccagcagatgagcagggatgggtcccctgaggttgatgtatctgtctccgtatcggcgatgcagtgcgcggcggacgaaggcatggaggttccagktagaggggctctagctgttggyagaggtgttccagatcgtcctcgaaggtgggggakttgtaccaggagcgccagtagcccccgtgtctgtgaagccgtcctgcttgtaggcttcattgctgagggcagtgaaatcctcgtacagcggtttcagcgggatgcccgcagcgttgtgccagccctcccaggcaaacaggagcatggcgtanttcgcgaggaagccaggatgttggtgagatctgggtccagggaccagcaggtggcagtcttgttggggaggcagaccttggcggtggagtagatcctgctcatgttgcttagcagggcgttgtactgctgccgcttagcagaaaagttgccgggctgcagcccggggtccaacgccagggcgggctgcggcggcagcagcaacagcagcggcagcggcagcagcagccccggcccccggcggcccgaggcggcccccatsrcagcggtrsgcggtgctcggcttcggatcgcgtgggtcgatcccgggaattcccggcatccggtcactcgtcaggcct

SEQ ID NO: 1508 - DNA, 1283 bp, Homo sapiens
  misc_feature (17)..(17): n equals a,t,g, or c
tcatcgatgatggttgnagagcgtataagagacagatataaaagaatcaacagcagataatgcacctaattcatggattaaagacaaagattaaaaaggaaagaagagtttgtcattttacatatcagaggaaatataataagttaagtctacaataatctgggttgaatgcatcacacttacacattgaaaatttatcagactgactttctgtggctatacaccatacacagtatagtaaagtaaccctcaggaaggacattagtctttaaaatcttggctttaaggaatgacaaatgtctttgaaaatattttgttcagtcactgtgattataaaagtacttcaattaagaaatccatctataatcaatcttaaatggcagtgcatttgaaaaatggcattggtttgtaatgtttgcatttccaaagaaaaatatagaaagaacttaaaaaagcaaggaaactggttttcaaaaaaagtatcgattcaaaaatctactgcacaaaaatatgtcttcttaagtgtttctaataaattaattccataacatttttatgtatatttatatatttatatakataatccctgatmatctataaaagagggtctataatagtaaaataagtgaacctcaaaagtacccccttcataaaatgtatgtaacattagtttttctcaaatttaaagaatgtaacaatatgtacaactcttatgtattagtataataccaaaatagtacaagtcatattaacaggctgtcataattgaaaaatgtttgagtcaagttaaaatctgaggacagcttagtttcaaacaaatacaattattatgggagattcactttccaagtggaaatgacaatcgtcttatctacagtagacttcacaagaggtagtgttcaagtagaaataaaaaaaagatacatgcttaactatctttaattaacaaattcacaggaaaaaatgtgttggtttctcagatgatcagttggtggcttttttaatatgaatctcattaagaatggcccaaacagcagaattctgaataactgaaagtcgaaaggctgaaatgggattgagacttggatccaccattccttctgcaacaccattctcaaattttcctattctgaaatagccatcttctaatcgtttgtctttggtttctttgcttatttccaaaccttcactcttaaaaggcaaaacttccacagttgtgtttagcagaatatctccaggatgttcttggttgccgctatggaacaaataactttctacgtcga

SEQ ID NO: 1509 - DNA, 604 bp, Homo sapiens
atcgatgattgttgagatgtgtataagagacagcctataatcccagcactttggtgataattcatcattttttaaaagtacttttataaagatcactgattgctgagaccggtaatattctttgtttatagtagtaatatcatttggaatagcgtgtttaagagtaataaatacagtctcttggacacgggactcacttatcagttcatactacaataaaatcattttggaaaatatactactaataatatatttcaccaaaaaacaatattacaattttctttaaaattataccaattatgactcatacaatagcaacacctagaaaacattttgtctgacgtcataaaatgagtgcagatataaaagaatcaacagcagataatgcacctaattcatggattaaagacaaagattaaaaaggaaagaagagtttgtcattttacatatcagaggaaatataataagttaagtctacaataatctgggttgaatgcatcacacttacacattgaaaatttatcagactgactttctgtggctatacaccatacacagtatagtaactgtctcttatacacatctcaaccctgaagcttgcatg

SEQ ID NO: 1510 - DNA, 330 bp, Homo sapiens
ctttttttttttttttaagtttcacctatttttattagaaggaatcttgaattcaacatggctttttaaacttctttatttcaaatacacatgaacggtcgtggcacagagaaacagtgatgaaggcacaatcaacaggaccagttactaggttttcaattatagcagcaaatctgaaaataaataatcttcctttaaaaatccaacaagtacctaaaatattactacggataggaatcattcagccaatgaagacattttaaggaaaatatatacaatacatttaararaaaaaaaaaagggcggccgctcgcgatctagaactagtcc

SEQ ID NO: 1511 - DNA, 899 bp, Homo sapiens
catgcaagcttcagggttgagatgtgtataagagacagcatctgagctgagaatttagaagacctcattcaagaaagtaaactgagcattgatgggaaagcactttgcgcgaagtaacattcccactgttaatgttgcagtcaaaattgtggaaaaaaaaaagtggtgctaaaattgttctgaaatgaagattgtttgttgtggggaatattttaatactcttggactttagggaggctattttatgtgtcacttgctcctagttgtttcattgtattagtaattagcaaactgtcctggaaccaagggtttggtacttttgcctgattagcattccattatttatttgaaatgctcagtgtttgctcaaatttggtgaaaatatcttttgaagacatattctctgagccttaaaaatggctgctatcgacagtactgtaagatgcactgccagtagatttgatacttttcatttcagtgtaggcagtaatgttttctaagaaagatttagaaatcagcaaagtgtaacaattgtgtttcatttatggaatggaaaaactgaagtgtcccattcagaacactttggaaaggttgtctgcattaggggatgtttctggaagcatcccttagagaagctgcctgaggaatctccttgccaggttgtaccagatttttttttttcttaaatgtattgtatatattttccttaaaatgtcttcattggctgaatgattcctatccgtagtaatattttaggtacttgttggatttttaaaggaagattatttattttcagatttgctgctataattgaaaacctagtaactggtcctgttgattgtgccttcatcactgtttctctgtgccacgacctgtctcttatacacatctcaaccctg

SEQ ID NO: 1512 - DNA, 1194 bp, Homo sapiens
  misc_feature (15)..(15): n equals a,t,g, or c
atcgatgatggttgnagagcgtataagagacaggtattgccatgtccttgatmcgagmcaagtagaactaaaagagagaaaatgagaggttaagactgtcagaagatgagaaatgtgagtcatamccataccttagtgttttaagggaactttatccagtccaatccctttatagaaaaggaacttttccaagttatgttgcagtatttatagtgtgtaaaattttgtttgactttggtagttgtgcattttaaattatgaatcttatatgctacgataactagtatgcttactttctttaatgcatgtgatcatacaatgctaaaaaggtattttttaaagacccaaccaaactgaggattttgttatacatatctgtatcaacacctatatataaactcttcttcttacctgaaacactccttcacccggtttgggcactaactagatcattttcaaaggaacaaacaggaaggagcaagctggcactccagggtgcatctgagctgagaatttagaagacctcattcaagaaagtaaactgagcattgatgggaaagcactttgcgcgaagtaacattcccactgttaatgttgcagtcaaaattgtggaaaaaaaaaagtggtgctaaaattgttctgaaatgaagattgtttgttgtggggaatattttaatactcttggactttagggaggctattttatgtgtcacwtgctcctagttgtttcattgtattagtaattagcaarstgtcctggaaccaagggtttggtacttttgcctgattagcattccattatttatttgaaatgctcagtgtttgctcaaatttggtgaaaatatcttttgaagacatattctctgagccttaaaaatggctgctatcgacagtactgtaagatgcactgccagtagatttgatacttttcatttcagtgtaggcagtaatgttttctaagaaagatttagaaatcagcaaagtgtaacaattgtgtttcatttatggaatggaaaaactgaagtgtcccattcagaacactttggaaaggttgtctgcattaggggatgtttctggaagcatcccttagagaagctgcctgaggaatctccttgccaggttgtaccagatttttttttttcttaaatgtattgtatatattctgtctcttatacactctcaacacatcatcga

SEQ ID NO: 1513 - DNA, 827 bp, Homo sapiens
cagggttgagatgtgtataagagacagctcttggactttagggaggctattttatgtgtcacttgctcctagttgtttcattgtattagtaattagcaaactgtcctggaaccaagggtttggtacttttgcctgattagcattccattatttatttgaaatgctcagtgtttgctcaaatttggtgaaaatatcttttgaagacatattctctgagccttaaaaatggctgctatcgacagtactgtaagatgcactgccagtagatttgatacttttcatttcagtgtaggcagtaatgttttctaagaaagatttagaaatcagcaaagtgtaacaattgtgtttcatttatggaatggaaaaactgaagtgtcccattcagaacactttggaaaggttgtctgcattaggggatgtttctggaagcatcccttagagaagctgcctgaggaatctccttgccaggttgtaccagatttttttttttcttaaatgtattgtatatattttccttaaaatgtcttcattggctgaatgattcctatccgtagtaatattttaggtacttgttggatttttaaaggaagattatttattttcagatttgctgctataattgaaaacctagtaactggtcctgttgattgtgccttcatcactgtttctctgtgccacgaccgttcatgtgtatttgaaataaagaagtttaaaaagccatgttgaattcaagattccttctaataaaaataggtgaaacttaaaaaaaaaaaaaaagggcggccgctctagaggctgtctcttatacacatctcaaccatcatcga

SEQ ID NO: 1514 - DNA, 766 bp, Homo sapiens
catgcaagcttcagggttgagagygtataagagacaggtatttatagtgtgtaaaattttgtttgactttggtagttgtgcattttaaattatgaatcttatatgctacgataactagtatgcttactttctttaatgcatgtgatcatacaatgctaaaaaggtattttttaaagacccaaccaaactgaggattttgttatacatatctgtatcaacacctatatataaactcttcttcttacctgaaacactccttcacccggtttgggcactaactagatcattttcaaaggaacaaacaggaaggagcaagctggcactccagggtgcatctgagctgagaatttagaagacctcattcaagaaagtaaactgagcattgatgggaaagcactttgcgcgaagtaacattcccactgttaatgttgcagtcaaaattgtggaaaaaaaaaagtggtgctaaaattgttctgaaatgaagattgtttgttgtggggaatattttaatactcttggactttagggaggctattttatgtgtcacttgctcctagttgtttcattgtattagtaattagcaaactgtcctggaaccaagggtttggtacttttgcctgattagcattccattatttatttgaaatgctcagtgtttgctcaaatttggtgaaaatatcttttgaagacatattctctgagccttaaaaatggctgctatcgacagtactgtaactgtctcttatacactctcaacacatcatcg

SEQ ID NO: 1515 - DNA, 705 bp, Homo sapiens
atcgatgatgtgttgagagcgtataagagacaggtccaagagtattaaaatattccccacaacaaacaatcttcatttcagaacaattttagcaccacttttttttttccacaattttgactgcaacattaacagtgggaatgttacttcgcgcaaagtgctttcccatcaatgctcagtttactttcttgaatgaggtcttctaaattctcagctcagatgcaccctggagtgccagcttgctccttcctgtttgttcctttgaaaatgatctagttagtgcccaaaccgggtgaaggagtgtttcaggtaagaagaagagtttatatataggtgttgatacagatatgtataacaaaatcctcagtttggttgggtctttaaaaaatacctttttagcattgtatgatcacatgcattaaagaaagtaagcatactagttatcgtagcatataagattcataatttaaaatgcacaactaccaaagtcaaacaaaattttacacactataaatactgcaacataacttggaaaagttccttttctataaagggattggactggataaagttcccttaaaacactaaggtatggttatgactcacatttctcatcttctgacagtcttaacctctcattttctctcttttagttctacttgtctagtatctgtctctagtacacatctcaaccctgaagcttgc

SEQ ID NO: 1516 - DNA, 958 bp, Homo sapiens
  misc_feature (17)..(17): n equals a,t,g, or c
  misc_feature (58)..(58): n equals a,t,g, or c
cattggacgtttgttgncaaagttgcagcatcttactgagtagcgtttggtaaagganctgctagaatgagactataggaataggactgaaacagtgtgtaagggatcttttttatttctagaagaggtgttactttatactgatttagactgctctgagcctgtcagaagtaaattcaagaatgattaacagtggtattttagatacattaagagcaaaaataacctttgccttgtagagatcagayartctgtgtatcgagggatttaattttttttaaccaaaacttagtttctctttttatcatctagcacagatcaaatcctgtatgggccagccaaatgtttgtagtttgagaatgttttgcaaatacctctctgcttccaagccattaatagctaatgaagttttattttggtttgtccattaatttttctgcttatttttactgtattgccatgtccttgatacgagacaagtagaactaaaagagagaaaatgagaggttaagactgtcagaagatgagaaatgtgagtcataaccataccttagtgttttaagggaactttatccagtccaatccctttatagaaaaggaacttttccaagttatgttgcagtatttatagtgtgtaaaattttgtttgactttggtagttgtgcattttaaattatgaatcttatatgctacgataactagtatgcttactttctttaatgcatgtgatcatacaatgctaaaaaggtattttttaaagacccaaccaaactgaggattttgttatacatatctgtatcaacacctatatataaactsttcttcttacctgaaacactccttcacccggtttgggcactaactagatcattttcaaaggaacaaacaggaaggagcaagctggcactccagggtgcatctgagcctgtctcttatacgcatctcaaccatcatcgat

SEQ ID NO: 1517 - DNA, 604 bp, Homo sapiens
tcgatgatggttgagatgtgtataagagacagaccctggagtgccagcttgctccttcctgtttgttcctttgaaaatgatctagttagtgcccaaaccgggtgaaggagtgtttcaggtaagaagaagagtttatatataggtgttgatacagatatgtataacaaaatcctcagtttggttgggtctttaaaaaatacctttttagcattgtatgatcacatgcattaaagaaagtaagcatactagttatcgtagcatataagattcataatttaaaatgcacaactaccaaagtcaaacaaaattttacacactataaatactgcaacataacttggaaaagttccttttctataaagggattggactggataaagttcccttaaaacactaaggtatggttatgactcacatttctcatcttctgacagtcttaacctctcattttctctcttttagttctacttgtctcgtatcaaggacatggcaatacagtaaaaataagcagaaaaattaatggacaaaccammataaaacttcattagctattaatggcttggaagcctgtctcttatacacatctcaaccctgaagcttgcat

SEQ ID NO: 1518 - DNA, 695 bp, Homo sapiens
  misc_feature (666)..(666): n equals a,t,g, or c
  misc_feature (671)..(672): n equals a,t,g, or c
atgcaagcttcagggttgagatgtgtataagagacagccagccccctttctctctcttaactccctctccctgctgtcgttgccatactcttgcatacacaatcggttrtctagtttttgattgtttgtgtgtatggtgtgtgctgtctctctgaccagatttcaggttcctgaggcgagcctgcagctcatactgctcatctgtcctctcctrtggtgggtgctcagggcctctcactgttagttactccctcctttctgcccagttctgcactcaactagtagaagcagccatcctttccccaagcaggaaattgtagtggtcgcccttaagagcagtgtgagggcagaagattaagggaggggaagagtccctggaactggaagaaggtaaatactttgccttgagagggcgccgaaycattttaccaaaatagtaaatggaaaaagwgwmaaaggttgggactagttttaaaaacacatatagccagtagacacatgggggctgtttaaataaaaacatttttttacccggttctgccatcacacacactagtgacattccaagtactcagtggccatgtggaagctagtggccaccacacttgacaccacggatgcagaacttttccatcactgcagaaagctctgttgaacagtactggngcccnnagtgctaattatgaacagcctta

SEQ ID NO: 1519 - DNA, 795 bp, Homo sapiens
catgcaagcttcagggttgagagtgtataagagacagggtgtgtgctgtctctctgaccagatttcaggttcctgaggcgagcctgcagctcatactgctcatctgtcctctcctgtggtgggtgctcagggcctctcactgttagttactccctcctttctgcccagttctgcactcaactagtagaagcagccatcctttccccaagcaggaaattgtagtggtcgcccttaagagcagtgtgagggcagaagattaagggaggggaagagtccctggaactggaagaaggtaaatactttgccttgagagggcgccgaatcattttaccaaaatagtaaatggaaaaagtgtcaaaggttgggactagttttaaaaacacatatagccagtagacacatgggggctgtttaaataaaaacatttttttacccggttctgccatcacacacactagtgacattccaagtactcagtggccatgtggagctagtggccaccacacttgacaccacggatgcagaacttttccatcactgcagaaagctctgttgaacagtactgtgtccagagtgctaattatgaacagcttagaaaccacaattaatacattctcatgaggttaaaagcagacatgggaatagaacataatgcaaatgatgatgaatattttgggtgagaagagaaagctgaggacccatttctaggattctaagatgtaagatttcttaagttctttatcttagtctcatgcattctccacctgtctcttaacactctcaacaatcatcgat

SEQ ID NO: 1520 - DNA, 961 bp, Homo sapiens
  misc_feature (946)..(946): n equals a,t,g, or c
cagggttgagatgtgtataagagacagagcctgggcgacacagctagactccgtctcaaaaaaaaaaaaaaagatgaagtatcaacatcagttcccagccagtctgcttggacacactggggtgccacaagtgggttgcaggttggttgcagacgggcagagatggattctgctgagctttcagagtgaccactggctggggcctagcgctggggcaaggttccagctggctgcctctagcctggaggagcttcatctagttacccaatgtgctgaaccaacagcatgaaatagcatcatttcctgtgcagtgttacaaagtgcaaacgtttggaaacactgatacagtacaattatttccatcactccatgttgttataatttttagttacttttcttgattgaaaagtcaatcacattgccaaaaatgatttttatgtcagttaaaggccagttgaaatttttttattaggatgttttaaatttacttttcactttcttgaatttttttcttctcaaatttccttggcccagtgcccatgagcaaatttcattcaaaaacaggaataaccttttgtcataaaattttggcaccagcttggtatactaaattactgcaaaaataactgagtaccagaagtaaaaatctctgcaggtgggcttaggagtactcttgggtccctggttcctcagttgccaactctggtttcatgaagaaagaccatgctctgaaaatctagggaggagaaagttattgcagcacctggtgtgatttgttacaacttctttaaagacagcctgcctggctagctttttcctgttttcatgcagtttgccctcccagcattggtccacctgttgttcccaagaaactcattcttgttcccaagactccttttagccaaatctttcctatcattcctggagctgtctcttatacgctctncaaccatcatcgatg

SEQ ID NO: 1521 - DNA, 841 bp, Homo sapiens
  misc_feature (14)..(14): n equals a,t,g, or c
tcgatgatggttgnagagcgtataagagacagactgaattcagcccataagctcattcataggcttggaaaggcattcatctccagtctccagataagacccagcctggccaacactttgaatccagccttgtgagaccctaagccgagaactcacttaagcctgcttggacttctgacctacagaactatgagataataaatcagtggtgttttaagctgctaaatttgtggcaatttgttatgtaggaataggaaatgaatacagtattttaaaagaggtaaagaggaaatcttcatacttgattccctgtagtatgctggatatttcttggtaaatgcatgaataaagtctttagtagcaagtcatgtacctggacctcgttggggatgttctcgccagagatctcaattagtcttcattggacgtttgttggcaaagttgcagcatcttactgagtagcgtttggtaaaggaactgctagaatgagactataggaataggactgaaacagtgtgtaagggatcttttttatttctagaagaggtgttactttatactgatttagactgctctgagcctgtcagaagtaaattcaagaatgattaacagtggtattttagatacattaagagcaaaaataacctttgccttgtagagatcagataatctgtgtatcgagggatttaattttttttaaccaaaacttagtttctctttttatcatctagcacagatcaaatcctgtatgggccagccaaatgtttgtagtttgagaatgttttgcaaatacctctctgcttccaagctgtctcttatagacatctcaacaatcatcgat

SEQ ID NO: 1522 - DNA, 581 bp, Homo sapiens
atcgatgatkgttgagagtgtataagagacagctataaatactgcaacataacttggaaaagttccttttctataaagggattggactggataaagttcccttaaaacactaaggtatggttatgactcacatttctcatcttctgacagtcttaacctctcattttctctcttttagttctacttgtctcgtatcaaggacatggcaatacagtaaaaataagcagaaaaattaatggacaaaccaaaataaaacttcattagctattaatggcttggaagcagagaggtatttgcaaaacattctcaaactacaaacatttggctggcccatacaggatttgatctgtgctagatgataaaaagagaaactaagttttggttaaaaaaaattaaatccctcgatacacagattatctgatctctacaaggcaaaggttatttttgctcttaatgtatctaaaataccactgttaatcattcttgaatttacttctgacaggctcagagcagtctaaatcagtataaagtaacacctcttctagaaataaaaaagatcccttacacactgtttcagtcct

SEQ ID NO: 1523 - DNA, 4417 bp, Homo sapiens
ccacgcgtccgaaaatattttcaaagacatttgtcattccttaaagccaagattttaaagactaatgtccttcctgagggttactttactatactgtgtatggtgtatagccacagaaagtcagtctgataaattttcaatgtgtaagtgtgatgcattcaacccagattattgtagacttaacttattatatttcctctgatatgtaaaatgacaaactcttctttcctttttaatctttgtctttaatccatgaattaggtgcattatctgctgttgattcttttatatctgcactcattttatgacgtcagacaaaatgttttctaggtgttgctattgtatgagtcataattggtataattttaaagaaaattgtaatattgttttttggtgaaatatattattagtagtatattttccaaaatgattttattgtagtatgaactgataagtgagtcccgtgtccaagagactgtatttattactcttaaacacgctattccaaatgatattactactataaacaaagaatattaccggtctcagcaatcagtgatctttataaaagtacttttaaaaaatgatgaattatcaccaaagtgctgggattataggtgtgtgccaccatgtccagccccctttctctctcttaactccctctccctgctgtcgttgccatactcttgcatacacaatcggttatctagtttttgattgtttgtgtgtatggtgtgtgctgtctctctgaccagatttcaggttcctgaggcgagcctgcagctcatactgctcatctgtcctctcctgtggtgggtgctcagggcctctcactgttagttactccctcctttctgcccagttctgcactcaactagtagaagcagccatcctttccccaagcaggaaattgtagtggtcgcccttaagagcagtgtgagggcagaagattaagggaggggaagagtccctggaactggaagaaggtaaatactttgccttgagagggcgccgaatcattttaccaaaatagtaaatggaaaaagtgtcaaaggttgggactagttttaaaaacacatatagccagtagacacatgggggctgtttaaataaaaacatttttttacccggttctgccatcacacacactagtgacattccaagtactcagtggccatgtggagctagtggccaccacacttgacaccacggatgcagaacttttccatcactgcagaaagctctgttgaacagtactgtgtccagagtgctaattatgaacagcttagaaaccacaattaatacattctcatgaggttaaaagcagacatgggaatagaacataatgcaaatgatgatgaatattttgggtgagaagagaaagctgaggacccatttctaggattctaagatgtaagatttcttaagttctttatcttagtctcatgcattctccacatcacgcgctgtaccatactgtgtagtcagaacagacagtgtgattgaaaagctttggaaaaagttaacacaaaggattatttagcacataggctgtagatacgtatgtgtgtatttgttcaacaattggagatggttgaatacccttgaacaaagtgtgtatcttctcaaatcagtggttgcactagtcaataattagaaggtgttgttatttttaaaactataagcaaaattatgaaggcctttaaaaaatctatcataataatgaaaaagaggttgtctcccaacagtgctgtccctcaaagaaaagactggttatgtggaaacagcacgtttggagagattattctagtgaataacagtgtatatttgtggtaggcaaatttctaagaatgacccctactgacacccccaccaatgaccttgtataatatcctcccactttgagcatgggtggaacctgtttgatccatgattatatcatgttatgtagcaaaggaagactgtctgggggtggctaatcaaatcttgtgactcctttaaaagcagagagttttctcgggctggtggcagaagtcaagagacaaagcagaaggacctcaggcaccattgctgttttaaggtagagggggctgcatgagaaggaatgcacatggctttgaggagctgagagaggccttggctaacagcaaaggagctgggaactgcagtcctacagccacaggaactgaattcagcccataagctcattcataggcttggaaaggcattcatctccagtctccagataagacccagcctggccaacactttgaatccagccttgtgagaccctaagccgagaactcacttaagcctgcttggacttctgacctacagaactatgagataataaatcagtggtgttttaagctgctaaatttgtggcaatttgttatgtaggaataggaaatgaatacagtattttaaaagaggtaaagaggaaatcttcatacttgattccctgtagtatgctggatatttcttggtaaatgcatgaataaagtctttagtagcaagtcatgtacctggacctcgttggggatgttctcgccagagatctcaattagtcttcattggacgtttgttggcaaagttgcagcatcttactgagtagcgtttggtaaaggaactgctagaatgagactataggaataggactgaaacagtgtgtaagggatcttttttatttctagaagaggtgttactttatactgatttagactgctctgagcctgtcagaagtaaattcaagaatgattaacagtggtattttagatacattaagagcaaaaataacctttgccttgtagagatcagataatctgtgtatcgagggatttaattttttttaaccaaaacttagtttctctttttatcatctagcacagatcaaatcctgtatgggccagccaaatgtttgtagtttgagaatgttttgcaaatacctctctgcttccaagccattaatagctaatgaagttttattttggtttgtccattaatttttctgcttatttttactgtattgccatgtccttgatacgagacaagtagaactaaaagagagaaaatgagaggttaagactgtcagaagatgagaaatgtgagtcataaccataccttagtgttttaagggaactttatccagtccaatccctttatagaaaaggaacttttccaagttatgttgcagtatttatagtgtgtaaaattttgtttgactttggtagttgtgcattttaaattatgaatcttatatgctacgataactagtatgcttactttctttaatgcatgtgatcatacaatgctaaaaaggtattttttaaagacccaaccaaactgaggattttgttatacatatctgtatcaacacctatatataaactcttcttcttacctgaaacactccttcacccggtttgggcactaactagatcattttcaaaggaacaaacaggaaggagcaagctggcactccagggtgcatctgagctgagaatttagaagacctcattcaagaaagtaaactgagcattgatgggaaagcactttgcgcgaagtaacattcccactgttaatgttgcagtcaaaattgtggaaaaaaaaaagtggtgctaaaattgttctgaaatgaagattgtttgttgtggggaatattttaatactcttggactttagggaggctattttatgtgtcacttgctcctagttgtttcattgtattagtaattagcaaactgtcctggaaccaagggtttggtacttttgcctgattagcattccattatttatttgaaatgctcagtgtttgctcaaatttggtgaaaatatcttttgaagacatattctctgagccttaaaaatggctgctatcgacagtactgtaagatgcactgccagtagatttgatacttttcatttcagtgtaggcagtaatgttttctaagaaagatttagaaatcagcaaagtgtaacaattgtgtttcatttatggaatggaaaaactgaagtgtcccattcagaacactttggaaaggttgtctgcattaggggatgtttctggaagcatcccttagagaagctgcctgaggaatctccttgccaggttgtaccagatttttttttttcttaaatgtattgtatatattttccttaaaatgtcttcattggctgaatgattcctatccgtagtaatattttaggtacttgttggatttttaaaggaagattatttattttcagatttgctgctataattgaaaacctagtaactggtcctgttgattgtgccttcatcactgtttctctgtgccacgaccgttcatgtgtatttgaaataaagaagtttaaaaagccatgttgaattcaagattccttctaataaaaataggtgaaacttaaaaaaaaaaaaaaa

SEQ ID NO: 1524 - DNA, 644 bp, Homo sapiens
  misc_feature (15)..(15): n equals a,t,g, or c
  misc_feature (30)..(30): n equals a,t,g, or c
  misc_feature (51)..(51): n equals a,t,g, or c
  misc_feature (637)..(637): n equals a,t,g, or c
  misc_feature (643)..(643): n equals a,t,g, or c
taggccttaaacctntgttaccagctttgntacggttccccagtagttgangctcgatccactaggtaggctcatttatcgttttgtttgcaatcagcatctattttgtccacccactttcaccctgcagcccatatccgccttatatttgctttctaacctaacccccgtaccatatgggcttgcaccgcgtttaacccaattatgtagcttcaaaactatttgtaaccagtgggttcacaccagtaggtacaacctgtggttaggcaattatcggcactttttttttttgttccctatcttatctctcttttggttcccctatgttgcttaagtacctacttggtctggatcatcctcttttcaatcgttattaactttttcccaaccacttctttcttttgcactttagtagtctccttaccccggtcatccgtaatggtattacttataggttgctgcgtatttctcgtataggcgacggattcgctatatctttaccctcccaccatttcccccaggctattaccttgccacttggttmgtcctcccctcaatacccgttcccccccccccccccaaagaaggagctcacaatcgggcgacaaaagggccagtacgagatagctagacgatngcacanc

SEQ ID NO: 1525 - DNA, 2130 bp, Homo sapiens
cgggtcgacccacgcgtccgcccacgcgtccgctagatcgcgagcggccgccctttttttttttttttgaagtaaactcaatttttattcttctatataatacatggatatatggataaattttcctttaaagagtttgcaaccctgaggcaatgtccttgggtacgtaacgtataaagcaacagcaaatgaaatctgaatgcgggaatgacaactggacttcgaaacataatttaatattcatgaaattgcacacataccaatagtattctatgtctcgtctagcctcttaatccaactatctcaactgccttgcagtttgcctaccagacaccccaactctctacatacattctgtcatgtaaatgctgaccttctgactgaaatttaataaattaacatgggatttacatcaagggatttttgtctggtgagtgcattgccagaaagcatgcctagttcctgaccacagcatctgcccacataaaaactttggcccccacaggggatgagatggcatctgactgcagtaacctcgaggtccttgagggtcccttgggatccaccaggagcaagtttttcatctaatctgagggccgcattaagggtatggcagaggaggggaaggccatggctggttagaagagatggaacgtcacagctactgggttacagaaccagtgaatctgatgtcctgttttcaggacgcatggcccatccacggagaagatggggcgacagtagggtctaaaggtggactgtggtacccgggggcaggaagagggacagttaggcctagatgtaaggagaccactatgctgcttcttcatctacctcacagatggccacagacctttcagtacatggcggaaacctatttctgaatattccgttttcccaaagttttataaaccatggtgagggcaaatgcttatgagaaactaagggtgtgttcattatattatttatatattatcatcttccctctgaggataacatacaagggtaaataaaaagcagacaaatagctaaaaggtgactcgagctgtaagctctttcaactagagggtgatttttgctttaaaatcatcaggcccgaaaagcaaatcttgaaagcaaaatctaactttggcccactgataacaatgatcctgagtccctccttcattcccaaagtctgtttttccgaggaatatcctccattaatattcattttgtgtcatcattatcacaaagggttaagtgcagctttcacttcattttaggcagagcttctgccccagtcctactgttgacctgctcacttcacttatcggaactcctgcgcggccggcggaagctggatacgttttcattcagtgcatagatccttcgggagaactcttcaaattctcccagaacttgttcgtcacactctactgccacagcactgtccactgggatgcagttaaatgcttctagctgatcacctgaggcgaaacctgtggcttccagcccgatgatttcttctgcttgctccacagtacagcagagctcagcttctgagactgggtggaactcgcctggaagctggacactggcggacccggcctgctcgctgggtaggagagtgccattgactgtggcccggtgcccggagagggcttctccttgttcttggctagggtgcacattcgcgtggcctccgtttaagctgccaactagatcctctccttttttcttgttttctttggagaagtccaaggaggtatccaaggaggaggatagagatgttatctttctctcggtctctcccatggaggggacggtggtcacaggctgggctaatgctgagttgtaactgggaggaggggttttgtactgaagtctctcattctcagagctggcccgttttcgatgtcctttgtctggtgaagggatccccccagagaagcctacatctgcacccccaaatatggagctttgtctcttaggaacagggattgcactggaggtgtgatgtctgtcactagaagagaaacaaaaacaagaagttactttgsacttcagaactcagtgtaagccttctggatccagagacagggaacagcatacttaggtctgagctaataaaaatagataagaatcaat

SEQ ID NO: 1526 - DNA, 2127 bp, Homo sapiens
cctgaacagaatcgcagattgccagcccttttcccgacccctacggaaagacgartccaggggccgtcctggcgaggtcaaaacatttagtctggtcttttcagtgtgccaggsactgtgccaagtattttgcttcgatgatttcacgtcatcttcaaaacaacctcatgagataattctttgagcaactactggggcattatattggacacttcagtaccaagagaaatacatacgatccttgtctaccaggagtctaatagaaagatggacagcgtggaccctgccagcagccaggccatggagctctctgatgtcaccctcattgagggtgtgggtaatgaggtgatggtggtggcaggtgtggtggtgctgattctagccttggtcctagcttggctctctacctacgtagcagacagcggtagcaaccagctcctgggcgctattgtgtcagcaggcgacacatccgtcctccacctggggcatgtggaccacctggtggcaggccaaggcaaccccgagccaactgaactcccccatccatcagagggtaatgatgagaaggctgaagaggcgggtgaaggtcggggagactccactggggaggctggagctgggggtggtgttgagcccagccttgagcatctccttgacatccaaggcctgcccaaaagacaagcaggtgcaggcagcagcagtccagaggcccccctgagatctgaggatagcacctgcctccctcccagccctggcctcatcactgtgcggctcaaattcctcaatgataccgaggagctggctgtggctaggccagaggataccgtgggtgccctgaagagcaaatacttccctggacaagaaagccagatgaaactgatctaccagggccgcctgctacaagacccagcccgcacactgcgttctctgaacattaccgacaactgtgtgattcactgccaccgctcacccccagggtcagctgttccaggcccctcagcctccttggccccctcggccactgagccacccagccttggtgtcaatgtgggcagcctcatggtgcctgtctttgtggtgctgttgggtgtggtctggtacttccgaatcaattaccgccaattcttcacagcacctgccactgtctccctggtgggagtcaccgtcttcttcagcttcctagtatttgggatgtatggacgataaggacataggaagaaaatgaaaggcatggtctttctcctttatggcctccccacttttcctggccagagctgggcccaagggccggggagggaggggtggaaaggatgtgatggaaatctcctccataggacacaggaggcaagtatgcggcctccccttctcatccacaggagtacagatgtccctcccgtgcgagcacaactcaggtagaaatgaggatgtcatcttccttcacttttagggtcctctgaaggagttcaaagctgctggccaagctcagtggggagcctgggctctgagattccctcccacctgtggttctgactcttcccagtgtcctgcatgtctgcccccagcacccagggctgcctgcaagggcagctcagcatggccccagcacaactccgtagggagcctggagtatccttccatttctcagccaaatactcatcttttgagactgaaatcacactggcgggaatgaagattgtgccagccttctcttatgggcacctagccgccttcaccttcttcctctaccccttagcaggaatagggtgtcctcccttctttcaaagcactttgcttgcattttattttatttttttaagagtccttcatagagctcagtcaggaaggggatggggcaccaagccaagcccccagcattgggagcggccaggccacagctgctgctcccgtagtcctcaggctgtaagcaagagacagcactggcccttggccagcgtcctaccctgcccaactccaaggactgggtatggattgctgggccctaggctcttgcttctggggctattggagggtcagtgtctgtgactgaataaagttccattttgtggtmaaaaaaaaaaaaaaaaaaaaaaaaaaaaaaaaaaaaaaaaaaaaaaaaaaagggcggcc

SEQ ID NO: 1527 - DNA, 874 bp, Homo sapiens
  misc_feature (828)..(828): n equals a,t,g, or c
  misc_feature (835)..(835): n equals a,t,g, or c
  misc_feature (846)..(846): n equals a,t,g, or c
  misc_feature (857)..(857): n equals a,t,g, or c
ccagcccttttcccgacccctacggaaagacgagtccaggggccgtcctggcgaggtcaaaacatttagtctggtcttttcagcgtggaccctgccagcagccaggccatggagctctctgatgtcaccctcattgagggtgtgggtaatgaggtgatggtggtggcaggtgtggtggtgctgattctagccttggtcctagcttggctctctacctacgtagcagacagcggtagcaaccagctcctgggcgctattgtgtcagcaggcgacacatccgtcctccacctggggcatgtggaccacctggtggcaggccaaggcaaccccgagccaactgaactcccccatccatcagaggacaagcaggtgcaggcagcagcagtccagaggcccccctgagatctgaggatagcacctgcctccctcccagccctggcctcatcactgtgcggctcaaattcctcaatgataccgaggagctggctgtggctaggccagaggataccgtgggtgccctgaagagcaaatacttccctggacaagaaagccagatgaaactgatctaccagggccgcctgctacaagacccagcccgcacactgcgttctctgaacattaccgacaactgtgtgattcactgccaccgctcacccccagggtcagctgttccaggcccctcagcctccttggscccctcggccactgagccaccmagcttggtgtcaatgtggggcarcctcatggtgctgtmtttgtggtgctgttgggtgtrgtctggtacttycgaaatcaattaccgccaattcttcaaagcaactgccaatntctcccnggtgggaaatnaccgtcttctnaagcttcctaagtaatt

SEQ ID NO: 1528 - DNA, 1867 bp, Homo sapiens; identical to SEQ ID NO: 612

SEQ ID NO: 1529 - DNA, 1867 bp, Homo sapiens; identical to SEQ ID NO: 612

SEQ ID NO: 1530 - DNA, 2097 bp, Homo sapiens
  misc_feature (1959)..(1959): n equals a,t,g, or c
ggcctctgctcgcgctgcctgctcggagccgcttgctcggctgcctctggctgggctccgcgatcctctcccccaccctcgggcactgctccgcctccctcccggcgggctgtccccgcagtgctcccggacccggcgagccttcggggcgcgcgtcgctggtggtggttgaggctctagcgataataaatgatagaggatacaatgactttgctgtctctgctgggtcgcatcatgcgctacttcttgctgagacccgagacgcttttcctgctgtgcatcagcttggctctatggagttacttcttccacaccgacgaggtgaagaccatcgtgaagtccagccgggacgccgtgaagatggtgaagggcaaggtagccgagatcatgcagaacgatcgactcggggggcttgatgtgctcgaggccgagttttccaagacctgggagttcaagaaccacaacgtggcggtgtactccatccagggccggagagaccacatggaggaccgcttcgaagttctcacggatctggccaacaagacgcacccgtccatcttcgggatcttcgacgggcacgggggagagactgcagctgaatatgtaaaatctcgactcccagaggcccttaaacagcatcttcaggactacgagaaagacaaagaaaatagtgtattatcttaccagaccatccttgaacagcagattttgtcaattgaccgagaaatgctagaaaaattgactgtatcctatgatgaagcaggcacaacgtgtttgattgctctgctatcagataaagacctcactgtggccaacgtgggtgactcgcgcggggtcctgtgtgacaaagatgggaacgctattcctttgtctcatgatcacaagccttaccagttgaaggaaagaaagaggataaagagagcaggtggtttcatcagtttcaatggctcctggagggtccagggaatcctggccatgtctcggtccctgggggattatccgctgaaaaatctcaacgtggtcatcccagacccagacatcctgacctttgacctggacaagcttcagcctgagttcatgatcttggcatcagatggtctctgggatgctttcagcaatgaagaagcagttcgattcatcaaggagcgcttggatgaacctcactttggggccaagagcatagttttacagtcattttacagaggctgccctgacaatataacagtcatggtggtgaagttcagaaatagcagcaaaacagaagagcagtgaacccttcaggggtctcagctgccttagactaaaggactttcaacacactggtctcttttaatttagtgaaaagtgtgggagttgtaattaggatcatccaccccagacatggaatcccccctccctggtggtcttaggtctataatcagtgacgaacagagggtgcccttggccaatgtagttaagaaactggaaaatggtttcttcatgttttcccaactctttcatccagtgtccaaaatatataagtaaatagctgtagagtcacatatatgaagtgaatagcatatgtgtcatttagtctccctgaagattcttttcaagatcctgttcagggtcctccaggcatcagctgttgtgtcctctctttgtaacagtggacaggacagaccacccagtgctgcaggagacaggccactgcgtcacctgtgagtggtcaggggctgatgtggcaacaccctctgccaagagacagagctgtcctgagaatgctttgtccttctgagcccatgttttctgctcagtagcagcttggaagcagatttggaatggtttattattttggctgctcttggggactgcgagaagcagagagaatgagagaccagtggcaactgcctgcacagcagagataaccctcttcccttgcttcctttaatagttaaatagactttgtataccacctgnaccagcctttgtgcatttatcctaatcatgcatgaccgttaaccttttgcttagtccttaccatatgtaataggcagctgttaaattcaccaacagaataccctgatttttcatctttacgttttttttttttttttt

SEQ ID NO: 1531 - DNA, 1412 bp, Homo sapiens
  misc_feature (5)..(5): n equals a,t,g, or c
  misc_feature (32)..(32): n equals a,t,g, or c
  misc_feature (57)..(57): n equals a,t,g, or c
  misc_feature (64)..(64): n equals a,t,g, or c
  misc_feature (136)..(136): n equals a,t,g, or c
tgccntgcagggtaacctttccccaagcttcntccagccagaaaaccccttccaagntgccagntggcccaggccccggccaccaagctgttttcttaagccagctttccgagcaggctatttttggccctcgtgncagtgattgatagcttgctggaaaggtataaaagcagctttgcctgcgaaggttcttcacactgctcaggraagagcttgytacggtggactgtgagactcagtgcactgtcctcctcccagcgaccccacgctggaccccctgccggaccctccacccttcggcccccaagcttcccaggggcttcctttggactggactgtccctgctcatccattctcctgccacccccagacctcctcagctccaggtaagagagagcagctgcccttgggtttgagacaaaacacaagggctttgtttatttttgagggcaattcccagcctgaacttgcacagcctccctatgggttagagaccagggctgtctgtagagggctttgcatttataaagggattcaggggttatttcatgcatttcctacaacatcctggccaggggtatttataaccctgttttatggatgggtaagtggaggcctggagaggtggccttgccaaaggtcccatggtcagtgcgtggccgatcctggttttaaacccagccttcctctgaccagtgtttgttaggttaggttctcttatctgtgcacattctgaaacgataatgataaaatcttaagcctttggggtttttaacctgaacaggaagaaaagatcccagcagtcggagctctggtctgggctctgtagacttcaaattgctctcagggcaccggattcctacaggcagccccagaggagtgtggtgacgctgaggggcggtgggacgcatggcaggccctcaccaccaggcttctgtttcccaacaggttgccacctcctctcgccagagtgatgaggtcccggcttctgctctccgtggcccatctgcccacaattcgggagaccamgrarraratrctgcttgggggtcctggacaggagcccccaccctctcctagcctggatgactacgtgaggtctatatctcgactggcacagcccacctctgtgctggacaaggccacggcccagggccaacccaggccaccccacaggccagcccaggcctgccggaagggccgccctgctgtgtccctgcgagacatcaccgcacgtttcagtggccagcagcccacactgcccatggctgatactgtggaccccctggactgggtttttggggagtcccaggaaaagcagccaagccagagggacctgccaaggaggactggcccctctgctggcctctggggtccacatagacagatggacagcagcaagccctgggggc

SEQ ID NO: 1532 - DNA, 1420 bp, Homo sapiens
  misc_feature (817)..(817): n equals a,t,g, or c
tcgacccacgcgtccggcatattttaagacgcatggcttagagtggttatatggacttgtagacctaaaaacatctgagagcctagaagtgcacagcagtgtgcggatagattgagaggacttggctctgcaggtggacaacactctatttgaaagttgagagcagcatgttttgcccactgaaactcatcctgctgccagtgttactggattattccttgggcctgaatgacttgaatgtttccccgcctgagctaacagtccatgtgggtgattcagctctgatgggatgtgttttccagagcacagaagacaaatgtatattcaagatagactggactctgtcaccaggagagcacgccaaggacgaatatgtgctatactattactccaatctcagtgtgcctattgggcgcttccagaaccgcgtacacttgatgggggacatcttatgcaatgatggctctctcctgctccaagatgtgcaagaggctgaccagggaactatatctgtgaaatccgcctcaaaggggagagccaggtgttcaagaaggcggtggtactgcatgtgcttccagaggagcccaaagagctcatggtccatgtgggtggattgattcagatgggatgtgttttccagagcacagaagtgaaacacgtgaccaaggtagaatggatattttcaggacggcgcscaaaggtaacaaggaggaaacatcactgtgttagagaaggctctggctgatggtatcaggacaaaggtagaatcaggcacatgaggaggtgttgcaagagcctgggctttggtgcttatcanaactggaccttctcctagcaatttcwgcyttctggwgggaaasataactccaatgaagaacaagaacaagaagatgatgatgatgcttaactttttggatgccgatatgagattgtacatgtaaagcattttgtataagacttggcccctgcattttagtttccttctttctcccttttccttcgtatagagtccatgggagaatgagggagatgatttttgtggcccagccaagaaagcaatgggctagacattaaagtgattacacttttattcttactggggttagttctgtgagttttcatctgtgccccattgccccatttatgtgatggagggaattttcatgggtacttcacgtgttgggattgattgatcctgggggccagggtgaagggtattttacgggaactctataaagcaggaagaagcaagtttattctttagaccagtagctctcaaccatgatgtggtcgtatatttatgggtcaacatgtgttgtggggatatcccaagtaacttgktattaataaaagttaagttgcaaaatttaaaaaaaaaaaaaaaaaaaaaaaaaaaaaaaaaaaaaaaaaaagggcggcc

SEQ ID NO: 1533 - DNA, 1348 bp, Homo sapiens
cgggtcgacccacgcgtccgcaggcgcttaggggctgaggcgcgatggcaggtgtcggggctgggcctctgcgggcgatggggcggcaggccctgctgcttctcgcgctgtgcgccacaggcgcccaggggctctacttccacatcggcgagaccgagaagcgctgtttcatcgaggaaatccccgacgagaccatggtcatcggcaactatcgtacccagatgtgggataagcagaaggaggtcttcctgccctcgacccctggcctgggcatgcacgtggaagtgaaggaccccgacggcaaggtggtgctgtcccggcagtacggctcggagggccgcttcacgttcacctcccacacgcccggtgaccatcaaatctgtctgcactccaattctaccaggatggctctcttcgctggtggcaaactgcgkgtgcatctcgacatccaggttggggagcatgccaacaactaccctgagattgctgcaaaagataagctgacggagctacagctccgcgcccgccagttgcttgatcaggtggaacagattcagaaggagcaggattaccaaaggtatcgtgaagagcgcttccgactgacgagcgagagcaccaaccagagggtcctatggtggtccattgctcagactgtcatcctcatcctcactggcatctggcagatgcgtcacctcaagagcttctttgaggccaagaagctggtgtagtgccctctttgtatgacccttcctttttacctcatttatttggtactttccccacacagtcctttatccacctggatttttagggaaaaaaatgaaaaagaataagtcacattggttccatggccacaaaccattcagatcagccacttgctgaccctggttcttaaggacacatgacattagtccaatctttcaaaatcttgtcttagggcttgtgaggaatcagaactaacccaggactcagtcctgcttcttttgcctcgagtgattttcctctgtttttcactaaataagcaaatgaaaactctctccattaccttctgctttctctttgtccacttacgcagtaggtgactggcatgtgccacagagcaggccctgcctcactgtctgctggtcagttctgggttcacttaatggctttgtgaatgtaaataaggggcaggtcttggccctagaggattgagatgtttttctatatcttagaactatttttggataaattatatattttccttcctagtagaagtgttactgcctgtaactagctcaaaataccaatgcagtttctgcattctgggwtttgtttwtccttttatattttttttttttgagttttg

SEQ ID NO: 1534 - DNA, 330 bp, Homo sapiens
  misc_feature (268)..(268): n equals a,t,g, or c
  misc_feature (327)..(327): n equals a,t,g, or c
ttttttttttattacaacatgttttatttcactggaaaattctgtaaagaactaaatctggttcccttgaagaaaacatttagcacagcttaaataaaagttgagaaggagggtaagagtgcattgccccattctagctctgttgctaccttacctctgactctaaggccctgtgggatgaaaagcaggtatccaaaagaactctgcttggccctctgatacggccttgaggtcagccctggtgcctgctttctggcccacagaccgntgaaatcctaggagctgccatgggagttaccaaaaatatgtgaataaacggaatgcacnagt

SEQ ID NO: 1535 - DNA, 516 bp, Homo sapiens
cgcttaggggctgaggcgcgatggcaggtgtcggggctgggcctctgcgggcgatggggcggcaggccctgctgcttctcgcgctgtgcgccacaggcgcccaggggctctacttccacatcggcgagaccgagaagcgctgtttcatcgaggaaatccccgacgagaccatggtcatcggcaactatcgtacccagatgtgggataagcagaaggaggtcttcctgccctcgacccctggcctgggcatgcacgtggaagtgaaggaccccgacggcaaggtggtgctgtcccggcagtacggctcggagggccgcttcacgttcacctcccacacgcccggtgaccatcaaatctgtctgcactccaattctaccaggatggctctcttcgctggtggcaaactgcgtgtgcatctcgacatccaggttggggagcatgccaacaactaccctgagattgctgcaaaagataagctgacggagctacagctccgcgcccgccagttgcttgatc

SEQ ID NO: 1536 - DNA, 2796 bp, Homo sapiens
ggaaacaacawgtcaaattgatgattcattttctaccaagtcttgcagagtttcaggaggcagctgggttgtatatgatggagaaaatttcactggtaatcaatacgtgttggaagaaggccattatccttgtctgtctgcaatgggatgcccgcctggagcaactttcaagtctcttcgttttatagatgttgaattttctgaaccaacaattattctctttgaaagagaagacttcaaaggaaaaaagattgaacttaatgcagaaactgtcaatctccgatccctgggattcaacacacaaatacgctctgttcaggttattggtggcatatgggttacttatgaatatggcagttacagagggcgacagttcctattgtcacctgcagaagtacctaattggtatgaattcagtggctgtcgccaaataggttctctacgaccttttgttcaggagcgaatttatttcagacttcgaaacaaagcaacagggttattcatgtcaaccaatggaaacttagaggatctgaagcttctgaggatacaggtcatggaggatgtcggggccgatgatcagatttggatctatcaagaaggatgtatcaaatgcaggatagcagaagactgctgcctgacgattgtgggcagcctggtaacatctggctccaagctaggcctggccctggaccagaatgctgacagccagttctggagcttgaagtccgatggcaggatttacagcaagttgaagccaaatttagttttagacattaaagggggcacacagtatgatcaaaatcacattatcctcaacactgtcagcaaagagaagtttacacaagtgtgggaagccatggtcctatatacctgaacaaagaaggaagaagaatcttctggaggtccttccagccaccttatttcttaaaaaggacaatgctgatggaagaccagactggaaagtggatcgactcctccttcattgattctaaattcaaccttaaatcatgctgccatgactcagagaacttactcatcgtttcaaaagactatcatagctttaaaccaataatttgtcctcctttcatttcttgcctttcatttttggtagctgcttaaacaggttgcctaattagcagcttttgggtgattttgtaaaatgttatatcaagatttcaagactgtgtacattttaaattatttccaaagatagtgacaggagagaactggaacaaatttaccaactttgtggacctacaaagcccttacactttaaagggtaagacaaaggcttaagtttgaaaggtagagaactgtttagcatctgagaagaaatactttattaggcctgtaattttggttcttggccttaaacactttctggaacctttaaatatgctgcatagcacaatgggaaagccttaggtattcacacatttaaggaactctaaacaaaatactattttcctttagttcatattaaaaattaatacaytttaaaaatttaatgtcaaagtctggtaacatttgttagtaggatttgagttattattttttgagacaggatctcaggctggagtgcagtggcacaatcacggctcactgcagcctctacctccccaggctcaggtgatcctcccacctcagcctcccaagtagctgggactataggcacacatcaccaagcccagccaaattttgttttttttttgtagagatggggtttcatcacgttkcccaggctgatctcgaacctctgggctcaagcaattcactcgcctcggcctcccaaaatgctgggattacaggcctgagccactgcgcccagccaggatttgaattattttaactcatccatgggctgccctagaatgtcacaaatgagggttgtttaatgcctttcttatagctgctactggaacactattatgacctaatttatgagccatccttactcatctacaagtgctgaagcaatgttacatacttttttgctaaactcagattttttagcctaatttcttgtcctcctatccacctgcatccacacatggcctgcatggggctgccttccctgcagtgttctgcagccatgcttcagggtatagctgttggtggacagcctcaggtcttgggggcactatagccactaaacgaggtgtgaaaggctcaagaggatgaccagcaattaattatccccagaaagtgaaggaaaagagacctttagggatgttgctggtcaagtcttgatttgaccggagtcaaatcaatcttcaagcaatcttggaatcctcaactgcagtaagcatttcaaaatgcaaacaaactgcttaacaactgacaagacaccagcccatacgctgctcttccaacagtgggttctagctttgaacaaaagtgctaaacatttccttgaatatattcttcctctttttgtcctcatcactcaatactggtgctcttgtcacaggtagaacagcttgtttcttttccatctattcaagtgtgtttctaattctaaaatgctgatcttctctggagtctatggtaggcaattatggtcactggaatagtttgtcttgttttmaaatattattggtgcatgtacaacagcatccaacatatctgtcttgttcctagatatatagctctgattttaggccttttgtgcataccattacaatatggtggggtaagacattctacagtagcctgtgctgaactgatctcttaaataaacttgcttctggttaactaaaaaaaaaaaaaaaaaggaaktcgatatcaagcttatcg

SEQ ID NO: 1537 - DNA, 1265 bp, Homo sapiens
ccacgcgtccgggcgcttaggggctgaggcgcgatggcaggtgtcggggctgggcctctgcgggcgatggggcggcaggccctgctgcttctcgcgctgtgcgccacaggcgcccaggggctctacttccacatcggcgagaccgagaagcgctgtttcatcgaggaaatccccgacgagaccatggtcatcggtcaggcgggctgagggtggggaggccctttgtacccagctcagccctcggcggcgctccctcctcccgagcccagccgggtcgctggctcccccagtacctagcctgagggtgccccgaggacgccaggccccctgcctagagctccgggccgcacgtcggagggggccgggcggagaggcggcccactagggccggtcgtgactatgtgtctgccccgcaggcaactatcgtacccagatgtgggataagcagaaggaggtcttcctgccctcgacccctggcctgggcatgcacgtggaagtgaaggaccccgacggcaaggtggtgctgtcccggcagtacggctcggagggccgcttcacgttcacctcccacacgcccggtgaccatcaaatctgtctgcactccaattctaccaggatggctctcttcgctggtggcaaactgcgtgtgcatctcgacatccaggttggggagcatgccaacaactaccctgagattgctgcaaaagataagctgacggagctacagctccgcgcccgccagttgcttgatcaggtggaacagattcagaaggagcaggattaccaaagggcaagtgcatatctccttgtaatttgagagggcagttgacctttatacccactatacctactcaagtttctgcttgggagatcagctctgcagagaatggaatgagaagtattggtttagataggttgtttgtttgttgtttttgagacggagtttcactcttgttgcccatgctggagtgcaatgccatgatcttggctcactgcaacctccgcctccccaggctgaggcaggagaatggcgtgagctcgggaggtggagcttgcagtgagctgagatcgtgccactgcactccagcctgggcgacagagtgagactccttctaaaaaacaaaaacaaaaccaaaacagtagttagggtacacacacacaaattctagtgattttccccccagtactacccttgacttttgaaattcctgctttctcagagtttacaacatccttaccaaacagccttctccctccttaccaca

SEQ ID NO: 1538 - DNA, 139 bp, Homo sapiens
  misc_feature (124)..(124): n equals a,t,g, or c
catattgataatcttggttataagggacttaaaacaatgctgtaataaataaagtgtttcatgtgatcaaaaaaaaaaaaaaaaaaagggcggccgctctaaaagatccctccaggggcccaancttacccgtgcatgc

SEQ ID NO: 1539 - DNA, 2364 bp, Homo sapiens; identical to SEQ ID NO: 249

SEQ ID NO: 1540 - DNA, 110 bp, Homo sapiens
gctttcccagtgtgtgttcattgtaaccacttttgggaaagggctaaacatgtgaggcctggagatacgttgctaagttgctaggaacatgtggtgggcctttcatattc

SEQ ID NO: 1541 - DNA, 1190 bp, Homo sapiens
aattcggcacgaggwagaagttggtaacaagtgtccctattccccagagctccgagtgcagcagatggtgtccatgggcattgggaataaacccttcctggacatcaaagcccttggggagcggacgctgagtgccctgctcactggaagagccgcccgcacccgggcctccgtggccgtgtcatcctttgagcatgccggcccctcccttcccggcctttcgccgggagcctgctccctgcctgcccgcgtcgaggaggaggcctgggatctggacgtcaagcaaatttccctggccccagaaacacttgactcttctggagatgtgtccccaggaccaagaaacagccccagcctgcaacccccccaccctgggagcagcactcccaccctggccagtcgagggatcttagggctatcccgacagagtcatgctcgagccctgagtgaccccaccacgcctctgtgacctgggtgagtcagcatccccaatttctaccacatccagcactcctaccatcttgcatgtaccttccttcctgtccccggctacttgggagtcagcttcttccctctcccaactcatctccctcttctctcctggsttctagagaagatccagaacttgcgtgcagcttctcctctcagcacactttgggctgggatggcagtggggcataatggagccctgggcgatcgctgaatttcttccctctgcttcctggacacagaggaggtctaacgaccagagtattgccctgccaccactatctctagtctccctagcttggtgccttctcctgcaggagtcagagcagccacattgcttgccttcataccctggaggtggggaagttatccctcttccggtgctttcccatcctgggccactgtatccaggacatcactcccatgccagccctccctggcagcccatgttctcctcttttctcaccccctgactttccctgagaagaatcatctctgccaggtcaactggagtccctggtgactccattctgaggtgtcacaagcaatgaagctatgcaaacaataggagggtgtgacaggggaaccgtagactttatatatgtaattactgttattataatactattgttatattaaatgtatttactcacaaaaaaaaaaaaaaaaaacccgggggggggccggtaacccattgggcc

SEQ ID NO: 1542 - DNA, 1679 bp, Homo sapiens
  misc_feature (21)..(21): n equals a,t,g, or c
  misc_feature (36)..(36): n equals a,t,g, or c
  misc_feature (58)..(59): n equals a,t,g, or c
  misc_feature (150)..(150): n equals a,t,g, or c
cgggtggaaggtctatataancagagtcgttaagtnaaccggcagatcgcctggaagnnccatcccgctgttttgacctccatagaagccccgggaccgatccaagctccgggctctagcttagcccscgggacggataccawtttcacncagraaccagctatgcccctaggcttttgcaaaaagctatttaggtgcactatagaaggtacgcctgcaggtacsggtccggaattcccgggtcgacccacgcgtccgcggacgcgtggggggagctcgcaaatactccttttggtttattcttaccaccttgcttctgtgttccttgggaatgctgctgtgcttatgcatctggtctctttctggagctacagtggacaggcatttgtgacagcactatgggactgagtaacattctctttgtgatggccttcctgctctctggtgctgctcctctgaagattcaagcttatttcaatgagactgcagacctgccatgccaatttgcaaactctcaaaaccaaagcctgagtgagctagtagtattttggcaggaccaggaaaacttggttctgaatgaggtatacttaggcaaagagaaatttgacagtgttcattccaagtatatgggccgcacaagttttgattcggacagttggaccctgagacttcacaatcttcagatcaaggacaagggcttgtatcaatgtatcatccatcacaaaaagcccacaggaatgattcgcatccaccagatgaattctgaactgtcagtgcttgctaacttcagtcaacctgaaatagtaccaatttctaatataacagaaaatgtgtacataaatttgacctgctcatctatacacggttacccagaacctaagaagatgagtgttttgctaagaaccaagaattcaactatcgagtatgatggtattatgcagaaatctcaagataatgtcacagaactgtacgacgtttccatcagcttgtctgtttcattccctgatgttacgagcaatatgaccatcttctgtattctggaaactgacaagacgcggcttttatcttcacctttctctatagagcttgaggaccctcagcctcccccagaccacattccttggattacagctgtacttccaacagttattatatgtgtgatggttttctgtctaattctatggaaatggaagaagaagaagcggcctcgcaactcttataaatgtggaaccaacacaatggagagggaagagagtgaacagaccaagaaaagagaaaaaatccatatacctgaaagatctgatgaarcccagcgtgtttttaaaagttcgaagacatcttcatgcgacaaaagtgatacatgtttttaattaaagagtaaagcccatacaagtattcattttttctaccctttcctttgtaagttcctgggcaacctttttgatttcttccagaaggcaaaaagacattaccatgagtaataagggggctccaggactccctctaagtggaatagcctccctgtaactccagctctgctccgtatgccaagaggagactttaattctcttactgcttcttttcacttcagagcacacttatggccaagcccagcttaatggctcatgacctggaaataaaatttaggaccaataaaaamaaaaaraaaaaaactcgag

SEQ ID NO: 1543 - DNA, 2024 bp, Homo sapiens
cgtgccactgcactgccagccttggtgacagagcaagactccgtctccaaaaaaaagaaaaaaaaatttcttgaagtggaatgatgtacaccaaatacccactttatagataattacagggatggtgaaaaattagtaaatagcttcacaaaagaggcagcgtgatacctttagtgttttctagaatttttttctggatattatatgtaagaatttattgtttgagggaaatacgaggtttcattgtttaaaatcaagagtgtattgtttactgttttacagtattatttaatatccaactggtctccaatctccattacatagggactgtacagagcctgtgaagatgtatgaatggtatcttttataatccacaatacatttctggtaagatggaatcactacctctgatcacatatcaggctaacgatagagaaagcattaggtttaagttgagggctaagaactggtttgtttaaaggtttaaattgttggaaaagagcatttgccttctttaatgaatgatggtctcacaattcagttgactttgacctaatatttaagaatataaatatattttatttgaaaggctgagtgttgccctcaaacacttgctaaaactgcctagggcaggattcattagggcttgcagacaatgtcacctaaattgctgaatgtactcattataatatgatatctgacaaaggtagtacagcgtttctgagtcatttgggaccaactgcagtggttgtttaaaatgctggttcctgcacacaattctctatctactgaagcacatctgttttctttgtttgttttgctttgctttttgtttttaaagtttcccccagtgattccagtgcacctgaaaagttgagaaccacaggcttagtggtacgttggggtttcccacgctaggctgcatagcattataacctgggaacgttaaaaaaaatacagacattcttgattcttagtgtagttatgatgtggatcctacgtattttttaaaaaactctccagataattttgatgtcacgagtcactagtatagactatctatctagtgagttgtattataagcgatgaaatactttaaaagctacccagtaactcttgggattaattttatgaaataaattctgagctgctgcttttgatatagtcagacttaagactgaaccccagtagacaggcaatagatatagaattctggttagctaattgaacttttgtgacctgtttaaaaacaaatcaaatttattgaacaaatgacaaggcacaaatactttcagaattgtatttcagttttgaagatttaaaaaaaatgtgaaaataaatatatattagtatcctttattttaaagtcaattgtaaaccagaagtactgttattttggtgattaaaatccaaaactttagctgtatttcagtaacaaaacataccttactagactgtgatggctcacacctgtaatcccagtgctttgggaggctgaggtgggaagattctttgagcccaggagttcaaggctgcagtgaattctgatcgcaccactgaactccagcccgtatgacagagtgagaccctgtttctaaaaacaaaacaaacaaacaaacaaacaacgtatcttactgactaaactggaatggaaatcttataattagtgttgtatttttctgcaaaatagtgaattggtacttgggagacttctgttctttgttgaaaaaaattgcctttgttttgaaattatatcacctgtgttctgaactaaaatgatgggagttcattttgtatttactttgcagtaagtatcatgtaaatatgcaaatgttgaatgtaatatagattgtgtcctcattgagtttttgggtgatacagtttataaatataacaattatacaccctcatacattcgtctgattttgagcttgtaagatgagaactgctttttacacatttaataaaaaaaggtctctgaawwaaaaaaaaaaaaaaaaaaaaactggaggggggcccggtac

SEQ ID NO: 1544 - DNA, 470 bp, Homo sapiens
  misc_feature (12)..(12): n equals a,t,g, or c
  misc_feature (456)..(456): n equals a,t,g, or c
caaacaaacaangtatcttactgactaaactggaatggaaatcttataattagtgttgtatttttctgcaaaatagtgaattggtacttgggagacttctgttctttgttgaaaaaaattgcctttgttttgaaattatatcacctgtgttctgaactaaaatgatgggagttcattttgtatttactttgcagtaagtatcatgtaaatatgcaaatgttgaatgtaatatagattgtgtcctcattgagtttttgggtgatacagtttataaatataacaattatacaccctcatacattcgtctgattttgagcttgtaagatgagaactgctttttacacatttaataaaaaaaggtctctgaaaaaaaaaaaaaaaaaagggcggccgctctagaggatccctcgaggggcccaarcttacgcgtgcatgcgacgtcatagctctctccgncatagtgggtcgta

SEQ ID NO: 1545 - DNA, 772 bp, Homo sapiens
  misc_feature (609)..(609): n equals a,t,g, or c
cacagtcttccctgggcctcaggttcctaaatggaacgcctgggggttgtcttggatgccwtagttaaatcctgtccatttgctgagcactgcatgcttttcaaagtgcaatggggtcctttgcacttgtgggatacactgaacatatggtagtgttttcatttttctgacagagatagaaatataatctactggtgataccaagagaatatctggtttgctgctttgataactggagtagctactccactgtaagtagcacactggctttgttcacttttctgtgtgcccaggcacaagcgaatgtctttgaatgggtttcaggaatgccacagtatggcccccttcagcccttacagtggctggcagacaggtggtcatctctgcctaggagctttacctgagcaccacacaaatactgccatttcgccctgtggatcatgatggggtaaagatggggaagcattattcccttgccccctcccccgcctctcgtctttctctttttctgcatattgccagtgctcatcacctcttttctgtttctttgtggtttatagatgatcatgacgcagtcctgaggtttaatggggcacccacagccaactnmcaacamgatgtgggcacaaaaaytaccattcgcctgatgaactctcaggkaaaayttcttctgwgcagcaaaccaccatggsacatgtatacctatgtaataaacctgcacgttctgcacatgtatcccagaactgaaaagataataaaaaaaaaaaaaagg

SEQ ID NO: 1546 - DNA, 554 bp, Homo sapiens
  misc_feature (499)..(499): n equals a,t,g, or c
  misc_feature (533)..(533): n equals a,t,g, or c
  misc_feature (537)..(537): n equals a,t,g, or c
gctcatcacggccacagtagacctggggtggtaatgacaccctgcagtcatcaaccctggggctttagcctattccgtgttgatttctttaaactctaccccaacttggtaagtagtccttttatgaatctctcaattactccattggagcttctcatctcttttctactgggattctcaccaataatttattcatctgtgaaatggaaaagttgactaactgaagtttctgatggatctgtgtttctcatgcaattactactaatccctttcgaaccagtgactgattctgacaaaatgtgttgtaattctgagttgtgtaaagatatacctcctgccctatgtgcacttcagtgtacctgccctgtaagatgataacagtttggactgtgcccttctcagataattttcaaaccattttgatgaaattttgccctaggattgaggatagggttgtgttgttttcatgaatgatgtttctgtgttcctgaggtttagncatacattggaactgaaataaagagagaggcttncatncttaattctgtggatat

SEQ ID NO: 1547 - DNA, 3203 bp, Homo sapiens; identical to SEQ ID NO: 279

SEQ ID NO: 1548 - DNA, 3228 bp, Homo sapiens
ccacgcgtccggaaggaccacagctcctcccgtgcatccactcggcctgggaggttctggattttggctgtcgagggagtttgcctgcctctccagagaaagatggtcatgaggcccctgtggagtctgcttctctgggaagccctacttcccattacagttactggtgcccaagtgctgagcaaagtcgggggctcggtgctgctggtggcagcgcgtccccctggcttccaagtccgtgaggctatctggcgatctctctggccttcagaagagctcctggccacgtttttccgaggctccctggagactctgtaccattcccgcttcctgggccgagcccagctacacagcaacctcagcctggagctcgggccgctggagtctggagacagcggcaacttctccgtgttgatggtggacacaaggggccagccctggacccagaccctccagctcaaggtgtacgatgcagtgcccaggcccgtggtacaagtgttcattgctgtagaaagggatgctcagccctccaagacctgccaggttttcttgtcctgttgggcccccaacatcagcgaaataacctatagctggcgacgggagacaaccatggactttggtatggaaccacacagcctcttcacagacggacaggtgctgagcatttccctgggaccaggagacagagatgtggcctattcctgcattgtctccaaccctgtcagctgggacttggccacagtcacgccctgggatagctgtcatcatgaggcagcaccagggaaggcctcctacaaagatgtgctgctggtggtggtgcctgtctcgctgctcctgatgctggttactctcttctctgcctggcactggtgcccctgctcagggaaaaagaaaaaggatgtccatgctgacagagtgggtccagagacagagaacccccttgtgcaggatctgccataaaggacaatatgaactgatgcctggactatcagtaaccccactgcacaggcacacgatgctctgggacataactggtgcctggaaatcaccatggtcctcatatctcccatgggaatcctgtcctgcctcgaaggagcagcctgggcagccatcacaccacgaggacaggaagcaccagcacgtttcacacctcccccttccctctcccatcttctcatatcctggctcttctctgggcaagatgagccaagcagaacattccatccaggacactggaagttctccaggatccagatccatggggacattaatagtccaaggcattccctcccccaccactattcataaagtattaaccaactggcaccaaggaattgcctccagcctgagtcctaggctctaaaagatattacatatttgaactaatagaggaactctgagtcacccatgccagcatcagcttcagccccagaccctgcagtttgagatctgatgcttcctgagggccaaggcattgctgtaagaaaaggtctagaaataggtgaaagtgagaggtgggggacaggggtttctctttctggcctaaggactttcaggtaatcagagttcatgggccctcaaaggtaaattgcagttgtagacaccgaggatggttgacaacccatggttgagatgggcaccgttttgcaggaaacaccatattaatagacatcctcaccatctccatccgctctcacgcctcctgcaggatctgggagtgagggtggagagtctttcctcacgctccagcacagtggccaggaaaagaaatactgaatttgccccagccaacaggacgttcttgcacaacttcaagaaaagcagctcagctcaggatgagtcttcctgcctgaaactgagagagtgaagaaccataaaacgctatgcagaaggaacattatggagagaaagggtactgaggcactctagaatctgccacattcattttcaaatgcaaatgcagaagacttaccttagttcaaggggaggggacaaagaccccacagcccaacagcaggactgtagaggtcactctgactccatcaaactttttattgtggccatcttaggaaaatacattctgcccctgaatgattctgtctagaaaagctctggagtattgatcactactggaaaaacacttaaggagctaaacttaccttcggggattattagctgataaggttcacagtttctctcacccaggtgtaactggattttttctggggcctcaatccagtcttgataacagcgaggaaagaggtattgaagaaacaggggtgggtttgaagtactattttcccagggtggcttcaatctccccacctaggatgtcagccctgtccaaggaccttccctcttctccccagttcctgggcaatcacttcaccttggacaaaggatcagcacagctggcctccagatccacatcaccactcttccactcgattgttcccagatcctccctgcctggcctgctcagaggttccctgttggtaacctggctttatcaaattctcatccctttcccacacccacttctctcctatcaccttcccccaagattacctgaacagggtccatggccactcaacctgtcagcttgcaccatccccacctgccacctacagtcaggccacatgcctggtcactgaatcatgcaaaactggcctcagtccctaaaaatgatgtggaaaggaaagcccaggatctgacaatgagccctggtggatttgtggggaaaaaatacacagcactccccacctttctttcgttcatctccagggccccacctcagatcaaagcagctctggatgagatgggacctgcagctctccctccacaaggtgactcttagcaacctcatttcgacagtggtttgtagcgtggtgcaccagggccttgttgaacagatccacactgctctaataaagttcccatccttaatgactcacttgtcaactagtggactaattaaccctccaccaaaaaaacacaaagtgcttctgtgagaccaattttgtgctaatgagcattgagactgatgctttgtaagtcacaccacaacaaatattgattgagggcgctgcatgtgctgggtacatttcttggcacttgggaatcagtagtcaagcgaaacccttgcctttgagagtttatggtctggataatataaataaacaagtaagcataaaaaaaaaaaaaaaaaaaaaaaaaaaaaaaaaaaaa

SEQ ID NO: 1549 - DNA, 3317 bp, Homo sapiens
  misc_feature (2114)..(2114): n equals a,t,g, or c
ggcagagtggttcccgggctgtccccactccacaccgtggcagtgaagagctgctgaagtacatgcttcatagtccttgcgtctctctgaccatgaatggcacctacaacacctgtggctccagcgacctcacctggcccccagcgatcaagctgggcttctacgcctacttgggcgtcctgctggtgctaggcctgctgctcaacagcctggcgctctgggtgttctgctgccgcatgcagcagtggacggagacccgcatctacatgaccaacctggcggtggccgacctctgcctgctgtgcaccttgcccttcgtgctgcactccctgcgagacacctcagacacgccgctgtgccagctctcccagggcatctacctgaccaacaggtacatgagcatcagcctggtcayggccatcgccgtggaccgctatgtggccgtgcggcacccgctgcgtgcccgcgggctgcggtcccccaggcaggctgcggccgtgtgcgcggtcctctgggtgctggtcatcggctccctggtggctcgctggctcctggggattcaggagggcggcttctgcttcaggagcacccggcacaatttcaactccatggcgttcccgctgctgggattctacctgcccctggmcgtggtggtcttctgctccctgaaggtggtgactgccctggcccagaggccacccaccgacgtggggcaggcagargccacccgcaaggctgcccgcatggtctgggccaacctcctggtgttcgtggtctgcttcctgcccctgcacgtggggctgacagtgcgcctcgcagtgggctggaacgcctgtgccctcctggagacgatccgtcgcgccctgtacataaccagcaagctctcagatgccaactgctgcctggacgccatctgctactactacatggccaaggagttccaggaggcgtctgcactggccgtggctcccmgtgctaaggcccacaaaagccaggactctctgtgcgtgaccctcgcctaagaggcgtgctgtgggcgctgtgggccaggtctcgggggctccgggaggtgctgcctgccaggggaagctggaaccagtagcaaggagcccgrgatcagccctgaactcactgtgtattctcttggagccttgggtgggcagggacggcccaggtacctgctctcttgggaagagagagggacagggacaagggcaagaggactgaggccagagcaaggccaatgtcagagacccccgggatggggcctcacacttgccacccccagaaccagctcacctggccagagtgggttcctgctggccagggtgcagccttgatgacacctgccgctgcccctcggggctggaataaaactccccacccagagtcagtcctagtggggccctctgtgtttcgcactcgtgtggtgggaggcagggagggagcgcgtggctcagagggctggcggacatcttccagggacccttcggggctcttcactttgaggtcccccttggaccctttcaccccttcccacccccacccacctggagcgtgagcaggggctgttggaagctcctggcaggaccacagtagaggcccccagcccaggtttccttgctcaagacagggctgggagcagctgatctccatgtaggggctgcacagcggtgyaagggggggtgaccaaggtcaagcaggtgagggygggttggggwgkktgrmagtgaagggggtgsccaggscctgtcaaggaacccagccctcttctccttccttcagggaaaggctggaaaccatgtctggcaggggcaggggttgggtgcccactcaggtaaaggcacgatgtcctgctggtttctgcctctcctgtactcctgcatggagggcatctcgaaacccaagctggaaggacagggcactccagagacctcctgtgagtgtgggccagcacggcctgggctcaaaccccatcctgtcatcccatattgcatgtccacaggcaccgccccaccctgttccatgttccacaggactggagagagatggcagtcatgttctggcagggacatggcacaagcatgcggctgatggcatctcacaggacccangctccggagggcccatgcccaggagagccccataagggctctgtgcctaaaakggtgcatgcccaggtgggcccatgcccaggaaggtccatgcccaggatggtccatgagcaggagggcctcattcccaggagggtcccgtgcccaggagggctctatgcccaaaagggtcccatgtccgggagggtccatacgcaagggtgtccatgcctggttggggggggtctatgtccaggagggtcccatgcctggaagggtccatgctcaggagggttcatgcccaggagagtttatgccctggagggccccatgcccgggagagtcacgtgcacagagggccctgtgctcaggaggatacatgtccaggagtgtccctgtccaggaggctccatgcccaggaggctccatgtcaagaaagattcatgcytaggagggttcatgcccaggagtgtccctgcytaggaagatccattaccagaagggcccatgtcaaggagcgttcatgcccaggaaggtccagcccaggagggtccatgtcaaggaggttccatgcccaggagggtccatgctgaggtgggtccatgcccaggagggttcatgtccagaaaggtccatgcytaggagggcccatacacaacagagccctgtgcccaggaaggaccatgtcaaggagaaccccatgcccatgagggtccatgcccagtaagggccatgcccatgagatcmtcatgcccaggaaggcccatgcccaggagggtccatgcccaggccagttcatgcacaggagggccccatgcctaaaagtgtccatgcccaggaaggtccatgtccagaagagtccatacccaggagggctgatatggttaggctttgtgtctccacccaaatctcatcttgaattgtaatccctataataaccatagtccccatgtgtcaagggagagaccaggtggaggcaattggatcatgggggctgtttcccacatgctgttctcatgatagtgagtgagttctcatgagatctgatggktttataaggggctcttcccttcacttctccttcctactgtcttatgaagaaggttccttgcttccccttcaccttctgccatgattgtaagtttcctgaggcctccctagccatgctgaagtgtgagtcaattaaacctctttcctttaaaattaaaaaaaaaaaaaaaaaag

SEQ ID NO: 1550 - DNA, 300 bp, Homo sapiens
  misc_feature (284)..(284): n equals a,t,g, or c
tgctgaatactgcttcatagtcttgcgtctctctgaccatgaatggcactacaacactgtgctccacgactcactggcccccagcgatcaagtggcttctacgctattggggtcctgctggtgctaggctgctgctcaacacctggcgctctgggtgttctgtgcgmwgcacatggacgagaccgcatctacatgaccaactggcgtggcgactctgctgctgtgcacttgccttctgctgcatcctgcgagacactcagacagcgtgtgccagtctccaggcnttactgacaacagtac

SEQ ID NO: 1551 - DNA, 434 bp, Homo sapiens
  misc_feature (3)..(3): n equals a,t,g, or c
  misc_feature (40)..(40): n equals a,t,g, or c
  misc_feature (47)..(47): n equals a,t,g, or c
  misc_feature (72)..(72): n equals a,t,g, or c
ctnggcacttttctggaagcccaaggttgtatccagtganccaaccngttacggcccccacactgcttccantctagaggggaatggagagacmcaaagtwaaaatcaactggataagtaawtaawttatatatgttgtaaggcagtaagtgatatgaaaagaaaagaagaggtatattaggatwaaaaggtcagggaatgtcaggktgggggctgttgtaattttaaataaggtagtcagggcaaagccttgtggagatggtgagaacatgaaggtaatagtaacacaggaaggacagaatccatgaaatgtgccacacacatggacaaccaacatgaacaaaatatagctgctgctttgtttaaattttgttttaatcttaacaggcaatacacgtacatgctcttgttaaaaaaaaaaaaaaagggcggcc

SEQ ID NO: 1552 - DNA, 482 bp, Homo sapiens
tatcctggyttccagcaaccattgcaacttggcagtattctgagctggggaaggtggtggtgaagggggygggttgtattgtccttmtagatagagctgaagaacatggctttttggccttaagaatttgctttagtttctgattccatgaagcttcttggggaaaatctcggctctttgtgttattcctgccctctctatgtgcttgccttttgtccactttaatacgtggtagtgaccctctcgagaagggaaggaagtcaaggggagcaggcactggaactcccttctatgcagttggcttccccttaaaccccaacagcttgggggcctgcgggtgggacagtcattctttgccccttaaaaaacaatggatcaactaatacgtgttgagcacctaamtwatamtaggcactgttctggaagccaaagatgtatcagtgaaccaaacagatacggaccccacackgcttccamtctag

SEQ ID NO: 1553 - DNA, 732 bp, Homo sapiens
  misc_feature (1)..(1): n equals a,t,g, or c
  misc_feature (10)..(10): n equals a,t,g, or c
  misc_feature (14)..(14): n equals a,t,g, or c
  misc_feature (37)..(37): n equals a,t,g, or c
  misc_feature (667)..(667): n equals a,t,g, or c
  misc_feature (715)..(715): n equals a,t,g, or c
ntttgagctnaagncatgaaggaggaccaggacttanccaggctgtgagggcaagtgatgaaggagctttcctggtcccaggacccactagtagggaggctctgtcatgggagagggccctgtggattgaaggaacttaaaggtttgtgtgcttgggtcccaaggagctatgagatgaggctggaaagccaggaggagcccgtctatgcccaggccacatagccttggtcaggactttggtctgtattccataggaagaggacagtggtgacatgatgcaattttctgttgacaaggattgatcactctttgggatatctttaggcaggagagaggtgtagttcctgcaaggggcccatagatgcttctgaagctgttaatctactgtttgacctgcatggggattacttagtgtattcacgttgtgataattcatctagttgtatatttatgatttgttcgcctttttctgtgtgtattatatttgaatttttaaaatagttttaaaaaatgaaagtcactctagaagcaaatssgtgtcctagttagaagatttaaaggttrtcmtgaagaaagatggtaaaagcttggagcagggagtagscaggsctgatgaagtgaagctgatgagaaatgtgcagaagagaaaatagataacgagttgaanatacattgcttggcaggggatgacgccccgtgtcaggcttgtgcgatnggatttgaagaaacgtt

SEQ ID NO: 1554 - DNA, 1768 bp, Homo sapiens
  misc_feature (109)..(109): n equals a,t,g, or c
  misc_feature (127)..(127): n equals a,t,g, or c
  misc_feature (1624)..(1624): n equals a,t,g, or c
  misc_feature (1640)..(1640): n equals a,t,g, or c
  misc_feature (1645)..(1645): n equals a,t,g, or c
  misc_feature (1695)..(1695): n equals a,t,g, or c
  misc_feature (1726)..(1726): n equals a,t,g, or c
  misc_feature (1755)..(1755): n equals a,t,g, or c
cgcctgcaggaccgtccggaattcccggtcgacccacgcgtccgcagcaaccttgggctgggaacattgcttttaaggccactttcaatgggtaatgggcaaaggtggngaaggtgaaacttgtggngtcatgagctgactgccttttctgcaattcagtcaatacgggggcgcacagcaggttagagcaacgaacgtggggaaatagactctctaagaagctcctaaaccatgtggcattttctcccgggttgcctattttatgacaagccactacccaccttccaccccatattaacttctgtcagttccccwtgcycgtctgcctgctaggtctwtgtaaatgctgcttgtwctgcctgatacgctccttctctccttggtggggccacctcctgctcatcctcagawctgctcctagatgccgcttctcccaggaagtctatcctgattcctcaattctgaggttgatgggactgtacttctctcatcatagtactcttcctaccaaattgtacctattggtaccttctactgattggaaagtcttagggatgtatcctgatgccttgcccatcccaaggggcaggtgcctctgggaggtgagagtggggtctagactctcccccaccagccctggtgctcttggaggcatagcctgcccagcagcctgttcccactgcgtgtgtgtgctctgatggctctgaccacaccttctgcaggagatcccccagtgcagacacaggtgtttcctgggtggcggccgggtggggtgccttctggaactggcctgtgtgttttgggtgtgacccctcaactgagactgctttctctgggtgtaatccagagggctccatggaacccaagctgtctctgaccctaaggactctggggttggctgcaggctttggagggtccttgggatgtgtggcagtggtacagtttgggaasgctgagggcatccattctgtttctctgctgtgaaactgctgctctccccttccttttatgtggggcagaggtaggatggaaaaatccatgcagaaagagaggaaagattgacagggagagagaaggaaagaggaaaggaaaaaagcaagagaggggaggagtggagagagagaggtggagagtgtactcgtgtgctgagggtgctatagcagagtactgcacactgggtggcttcaaaacagacacttattttctcacagttctagaggctaagagtccaaggtcaaggtgctggaagggttgatttctgaagcctctctctgtggcttgcaggtggccgccctcttgctgtgttctcacgaggcctttcctatgcacttctgcctccctggtgtctgcctgtccaactctcctcttcttatgaggacaccagattggatyaggwggcctcattctatcctaatcacctctttaaagaccttatctctaaatatggtcacattctgaggtactcagggttagggcttcagcatatgattttttttttttaaatgatgagtgcacagttcagtccctaacagagagatgaaagaaagggagaaagcaggcgtgtagagacttggggttacaggagaacaggggtgccagcagagggaggagggagtgggtcggncgagcagtccactcanactgntggtctgaaaaacccacactagaggcatgttcagagaacacggggccagncttaaccctgtcacccctaggtgctgagccntaggtcaggaaagtggtaagggaacaagngggggacccaact

SEQ ID NO: 1555 - DNA, 3234 bp, Homo sapiens
gggcagatgaagcacatctcagctgagcagaaaaggcgcttcaacatcaagatgtgcttcgacatgctcaacagcctcatctccaacaattccaagctgaccagtcacgccatcacactgcagaagactgtggagtacatcaccaagctgcagcaggagagaggccagatgcaggaggaggcccggcggctgcgggaggagatcgaggagctcaatgccaccatcatctcctgccagcagctgctccctgccacgggagtccccgttacccggcgccagtttgatcacatgaaagacatgtttgacgaatacgtgaaaacccggaccttgcagaattggaagttctggattttcagcatcatcatcaagccgctgtttgagtcgttcaagggcatggtgtccaccagcagcctggaggagctgcaccggacggcgctctcctggctggaccagcactgctccctgcccatcctcaggccgatggtattgagcacgctgcggcagctgagcacctccacctccatcctcacagacccggcacagctgccagagcaggcgtccaaggctgtcaccaggattggcaagagattgggagagtcctagctgcttagctggcatgtggccgcatgagatgccaggagacccttccctgcccatggagagtaggctgcgccccccagcccttcctgacgctcagcctcggggcctctctccaactctgccggcccaccgtggcatcgggaggccatgctcaggtctgaagcaggtttggggcctgctgacagcaatagcccgcctttgggaaccccttgctgtgaactctctcactcagtgacctcagtcaccaacctcctctgccctcggggcagcgccacacaaaagggaagtgctggccgtgctggtcctgccctgctggtggcctgccgggcctggcgccggtgagcggaatcgatgggatgagggtgacagggcctgctcctgtcctgaggcccagccttgtccctcctgccacgtcctgtccacatgcatgcctctgcctgatgccctgctccactctctggtctgcccgtggggmagttggaaggcgtctttctttctcccctcaactctgacagcacccagcccttgtggatggacttgggcttctattcaggcttatgcatggcaggctgccagggggaagtgccttcttcagaggtcctccaggacacatgtgtgcagaaacggtggatgtggaacacacaggaccagaatggaagcgtgtgatgcacggtggctgctctggctgagaggccctgctgggcatgtttcatctgtccccttttagctccacctgacattgcaggatccatggggactcagcccagggccttctcggatgtcacctcaccgctgtggcccttctgccgttcttctccacttggctccagctgcagctgttgacagatcaagcatgtcctgtgggagcttagaaccctgaagttctagtgtctgaaagatcagactccacgtcctgctgtcagccttgtcatcttgtctgatgtctttcagctgggagccccaaaccaggacagttctcggaccaaagatgcccccacactcaaaagtctgtcccgtcttgtgtttggagaaggaaacaatgttggcaggcagcactctgtggtggtcagccctcagagctgtttctaggcatctctcagatcagacagcaaagaatctacccagatctgggctgggtggaggtgtggctgggctgggggccattctgagcctgcagtgagagtttggcccagcctcagtccttgctcttctctggctacctctgcagggagctgcaggggcaagcactctctccagcactcaggaagcccggccgagggtacctcctcgtggaaagaatgcactttaaagctctgctgaggagttcggagcccaggctttcaggcgacctctgccctccctgcctctcctcaccctccctctcttcctgcagggcctgggaagggctttgagggagcctgggagccatgtgaagaggggcacgcctgggctgtcccacagtttagatccagttggaggttctccctggctcctgcaggcctgcggggatctctccccacttcaggcctccggccagctgcctgccctcttgtctgtgcttcagccctgcacaaaagcagcttggtgacaccactcagccacccagagtacgtgtttacaggctttccagatcaccttcctgtggggtgaacgtaatgaggcggggctggtccttggaatttcccctggaaaatggtaacagactccatccttgacccggggatgagcatgaaggcattgtcccaaaggcagaggccaccgtggtaggaattccaccaaggccagaagggaaaaaggaagaacccaccgtgtctggctgtgcgggccctggggagggtcgtgagtgcagcccctctctacttcygtgcctttgtaaaacgtgtagataaccgcagtggttggctgagccaagaactctcctaaatcagtggctttctccccaccccttgctggggagtcatttttaaaaaaatctgtgggatataaaattggcctcctgctgcttcagcctacctctccctctgctgacttaatgtcgtgattctgtttcttcagatatttaaggctgttaggttgtgtgagccttgaagtgtgtgtgtgtgtcccagcgactgtccactgtccaggagatgcatgtctttgtattggagatatttctgtaactcattctcttggtgctcacgattgccatggccatagggccacagtgccgtatctgctgcagacatgattgtttcttgttctagaggttttcttgttttcgaatcttgcctgatgaatccagccagaccaaggggcctagatttgacctctgtcctgggctcctgggccaggtgcaggaacatctgaggccactctgctggccacctccagtgggtgctgaccacaggatgggctttgtttacactcattttcaccctgattcttgcccccactttcataaaagaaacttcaaaatgctgacgctttggagagtaagaaaatcaatcttggctgggcacggtggctcctgcctgtgatcctagcactttgggaggctgaagctgaaggatcacttgagctcaggagttggagaccaaccctggcaacataacaagaccctgtctctacaaaaaaaaaaaaaaaaaaactcga

SEQ ID NO: 1556 - DNA, 1278 bp, Homo sapiens
aattcccggtcgacccacgcgtccggaaggccccgccctgtgaagggataggagcctgactgttgcagctgcagtgagtggcggggaagcagcagcggccaggatgaatcccaggtgctctggagctggatggtgaaggtcggcactcttcaccctcccgagccctgcccgtctcggccccatgcccccaccagtcagccccgggccacaggcagtgagcaggcacctgggagccgaggccctgtgaccaggccaaggagacgggcgctccagggtcccagccacctgtcccccccatggagctgaggccctggttgctatgggtggtagcagcaacaggaaccttggtcctgctagcagctgatgctcagggccagaaggtcttcaccaacacgtgggctgtgcgcatccctggaggcccagcggtggccaacagtgtggcacggaagcatgggttcctcaacctgggccagatcttcggggactattaccacttctggcatcgaggagtgacgaagcggtccctgtcgcctcaccgcccgcggcacagccggctgcagagggagcctcaagtacagtggctggaacagcaggtggcaaagcgacggactaaacgggacgtgtaccaggagcccacagaccccaagtttcctcagcagtggtacctgtctggtgtcactcagcgggacctgaatgtgaaggcggcctgggcgcagggctacacagggcacggcattgtggtctccattctggacgatggcatcgagaagaaccacccggacttggcaggcaattatgatcctggggccagttttgatgtcaatgaccaggaccctgaccccagcctcggtacacacagatgaatgacaacaggcacggcacacggtgtgcggggraagtggctgcggtggccaacaacggtgtctgtggtgtaggtgtggcctacaacgsccgcattgraggggtgcgcatgctggatggcraggtgacaratgcagtggaggcacgytcgctgggcttgaaccccaacccagccatctgcccagggtgccccctcctctcccatccccctgccctcgtggccagcccggctggttttgtaagatactgggttggtgcacagtgatttttttcttgtaatttaaacaggcccagcattgctggttctatttaatggacatgagataatgttagaggttttaaagtgattaaacgtgcagactatgcaaaccaaaaaaaaaaaaaaaaaaaagrtttgcggccgcaaggttaatccct

SEQ ID NO: 1557 - DNA, 1383 bp, Homo sapiens
cgctgaacacgccagcccaatacttaaagagagcaactcctgactccgatagagactggatggacccacaagggtgacagcccaggcggaccgatcttcccatcccacatcctccggcgcgatgccaaaaagaggctgacggcaactgggccttctgcagagaaagacctccgcttcactgccccggctggtcccaagggtcaggaagatggattcatacctgctgatgtggggactgctcacgttcatcatggtgcctggctgccaggcagagctctgtgacgatgacccgccagagatcccacacgccacattcaaagccatggcctacaaggaaggaaccatgttgaactgtgaatgcaagagaggtttccgcagaataaaaagcgggtcactctatatgctctgtacaggaaactctagccactcgtcctgggacaaccaatgtcaatgcacaagctctgccactcggaacacaacgaaacaagtgacacctcaacctgaagaacagaaagaaaggaaaaccacagaaatgcaaagtccaatgcagccagtggaccaagcgagccttccaggtcactgcagggaacctccaccatgggaaaatgaagccacagagagaatttatcatttcgtggtggggcagatggtttattatcagtgcgtccagggatacagggctctacacagaggtcctgctgagagcgtctgcaaaatgacccacgggaagacaaggtggacccagccccagctcatatgcacaggtgaaatggagaccagtcagtttccaggtgaagagaagcctcaggcaagccccgaaggccgtcctgagagtgagacttcctgcctcgtcacaacaacagattttcaaatacagacagaaatggctgcaaccatggagacgtccatatttacaacagagtaccaggtagcagtggccggctgtgttttcctgctgatcagcgtcctcctcctgagtgggctcacctggcagcggagacagaggaagagtagaagaacaatctagaaaaccaaaagaacaagaatttcttggtaagaagccgggaacagacaacagaagtcatgaagcccaagtgaaatcaaaggtgctaaatggtcgcccaggagacatccgttgtgcttgcctgcgttttggaagctctgaagtcacatcacaggacacggggcagtggcaaccttgtctctatgccagctcagtcccatcagagagcgagcgctacccacttctaaatagcaatttcgccgttgaagaggaagggcaaaaccactagaactctccatcttattttcatgtatatgtgttcattaaagcatgaatggtatggaaaaaaaaaaaaaaaaaaaaaaaaaaaaaaaaaaaaa

SEQ ID NO: 1558 - DNA, 1697 bp, Homo sapiens
gaagttctcttcacggagccgcgcggctgcgggggcgcaaatagggtcastgggccgcttggcggtgtcgttgcggtaccaggtccgcgtgaggggttcgggggttctgggcaggcacaatggcgtctcgagcaggcccgcgagcggccggcaccgacggcagcgactttcagcaccgggagcgcgtcgccatgcactaccagatgagtgtgaccctcaagtatgaaatcaagaagctgatctacgtacatctggtcatatggctgctgctggttgctaagatgagcgtgggacacctgaggctcttgtcacatgatcaggtggccatgccctatcagtgggaatacccgtatttgctgagcattttgccctctctcttgggccttctctcctttccccgcaacaacattagctacctggtgctctccatgatcagcatgggactcttttccatcgctccactcatttatggcagcatggagatgttccctgctgcacagcagctctaccgccatggcaaggcctaccgtttcctctttggtttttctgccgtttccatcatgtacctggtgttggtgttggcagtgcaagtgcatgcctggcagttgtactacagcaagaagctcctagactcttggttcaccagcacacaggagaagaagcataaatgaagcctctttggggtgaagcctggacatcccatcgaatgaaaggacactagtacagcggttccaaaatcccttctggtgattttagcagctgtgatgttggtacctggtgcagaccaggccaaagttctggaaagctccttttgccatctgctgaggtggcaaaactataatttattcctggttggctagaactgggtgaccracagctatgaaacaaatttcagctgtttgaagttgaactttgaggtttttctttaagaatgagcttcgtccttgcctctactcggtcattctccccatttccatccattaccccttagccattgagactaaaggaaatagggaataaatcaaattacttcatctctaggtcacgggtcaggaaacatttgggcagctgctcccttggcaggctgtggtctcctctgcaaagcattttaattaaaaacctcaataaagatggccctgcccacactgtgccttgtgtttggggcttgatagagtgtgaaaggtgtgttgcttgaaaggtgtggccttagacactaggagatgatgggtagaagctccttgagaaacctagcagtggccatagagaagtagactgggtatggggaacctaagtcatagttgtaacctacagctgattggtaagaactatgggccagacatttaatctctccatctatgaaatagtccattctcatttatctaccttaggttatgggctcttcttttagttggatattcacatttatctttcagtgttaactgggtatcagttatgagtctactactgtataatggcatccaaaagaattttaaagtacctcggtttatagggatttacaattcagtagaaacttgttattcatgtgaaacagtgaacataatatctaatgatgtggagcaagtacattaaaaacaggaaggaagagatctgtgattaaactaaaggccctttcacacctaaaaaaaaaaaaaaaaaaaaaaaaaaaaaaaaaaaaaaaaaaaaaaaaaaaaaaaaag

SEQ ID NO: 1559 - DNA, 2589 bp, Homo sapiens
aattcggcacgaggttgcgggacccggggtgtctcctagcgcaaccggaactagccttctgggggccggcttcctttatctctggcggccttgtagtcgtctccgagactccccacccctccttccctcttgaccccctaggtttgattgccctttccccgaaacaactatcatgagcgcgaggctgccggtgttgtctccacctcggtggccgcggctgttgctgctgtcgctgctcctgctgggggcggttcctggcccgcgccggagcggcgctttctacctgcccggcctggcgcccgtcaacttctgcgacgaagaaaaaaagagcgacgagtgcaaggccgaaatagaactatttgtgaacagacttgattcagtggaatcagttcttccttatgaatacacagcgtttgatttttgccaagcatcagaaggaaagcgcccatctgaaaatcttggtcaggtactattcggggaaagaattgaaccttcaccatataagtttacgtttaataagaaggagacctgtaagcttgtttgtacaaaaacataccatacagagaaagctgaagacaaacaaaagttagaattcttgaaaaaaagcatgttattgaattatcaacatcactggattsaaamatacccatatagataaaccagaytgctyagggccccccayggacataagtaacaaggcttctggggagataaaaattgcctatacttactctgttagcttcgaggaagatgataagatcagatgggcgtctagatgggactatattctggagtctatgcctcatacccacattcagtggtttagcattatgaattccctggtcattgttctcttcttatctggaatggtagctatgattatgttacggacactgcacaaagatattgctagatataatcagatggactctacggaagatgcccaggaagaatttggctggaaacttgttcatggtgatatattccgtcctccaagaaaagggatgctgctatcagtctttctaggatccgggacacagattttaattatgacctttgtgactctatttttcgcttgcctgggatttttgtcacctgccaaccgaggagcgctgatgacgtgtgctgtggtcctgtgggtgctgctgggcacccctgcaggctatgttgctgccagattctataagtcctttggaggtgagaagtggaaaacaaatgttttattaacatcatttctttgtcctgggattgtatttgctgacttctttataatgaatctgatcctctggggagaaggatcttcagcagctattccttttgggacactggttgccatattggccctttggttctgcatatctgtgcctctgacgtttattggtgcatactttggttttaagaagaatgccattgaacacccagttcgaaccaatcagattccacgtcagattcctgaacagtcgttctacacgaagcccttgcctggtattatcatgggagggattttgccctttggctgcatctttatacaacttttcttcattctgaatagtatttggtcacaccagatgtattacatgtttggcttcctatttctggtgtttatcattttggttattacctgttctgaagcaactatacttctttgctatttccacctatgtgcagaggattatcattggcaatggcgttcattccttacgagtggctttactgcagtttatttcttaatctatgcagtacactacttcttttcaaaactgcagatcacgggaacagcaagcacaattctgtactttggttataccatgataatggttttgatcttctttctttttacaggaacaattggcttctttgcatgcttttggtttgttaccaaaatatacagtgtggtgaaggttgactgaagaagtccagtgtgtccagttaaaacagaaataaattaaactcttcatcaacaaagacctgtttttgtgactgccttgagttttatcagaattattggcctagtaatccttcagaaacaccgtaattctaaataaacctcttcccatacacctttcccccataagatgtgtcttcaacactataaagcatttgtattgtgatttgattaagtatatatttggttgttctcaatgaagagcaaatttaaatattatgtgcatttgtaaatacagtagctataaaattttccatacttctaatggcagaatagaggaggccatattaaataatactgatgaaaggcaggacactgcattgtaaataggattttctaggctcggtaggcagaaagaattatttttctttgaaggaaataactttttatcatggtaattttgaaggatgattcctatgatgtgttcaccaggggaatgtggcttttaaagaaaatcttctattggttgtaactgttcatatcttcttacttttctgtgttgacttcattattcccatggtattggccttttaaactatgtgcctctgagtctttcaatttataaatttgttatcttaataaatattataaaaatgwaaaaaaaaaaaaaaaaaaaaaaaaaaaaaaaaaaaaaaaggggaggg

SEQ ID NO: 1560 - DNA, 2033 bp, Homo sapiens
agacggcggtgcgcatgctctgttgcggtccgcttcggtttctgttgcgggacccggggtgtctcctagcgcaaccggaactagccttctgggggccggcttcctttatctctggcggccttgtagtcgtctccgagactccccacccctccttccctcttgaccccctaggtttgattgccctttccccgaaacaactatcatgagcgcgaggctgccggtgttgtctccacctcggtggccgcggctgttgctgctgtcgctgctcctgctgggggcggttcctggcccgcgccggagcggcgctttctacctgcccggcctggcgcccgtcaacttctgcgacgaagaaaaaaagagcgacgagtgcaaggccgaaatagaactatttgtgaacagacttgattcagtggaatcagttcttccttatgaatacacagcgtttgatttttgccaagcatcagaaggaaagcgcccatctgaaaatcttggtcaggtactattcggggaaagaattgaaccttcaccatataagtttacgtttaataagaaggagacctgtaagcttgtttgtacaaaaacataccatacagagaaagctgaagacaaacaaaagttagaattcttgaaaaaaagcatgttattgaattatcaacatcactggattgtggataatatgcctgtaacgtggtgttacgatgttgaagatggtcagaggttctgtaatcctggatttcctattggctgttacattacagataaaggccatgcaaaagatgcctgtgttattagttcagawttccatgaaagagatacattttacatcttcaaccatgttgacatcaaaatatactatcatgttgttgaaactgggtccatgggagcaagattagtggctgctaaacttgaaccgaaaagcttcaaacatacccatatagataaaccagactgctcagggccccccatggacataagtaacaaggcttctggggagataaaaattgcctatacttactctgttagcttcgaggaagatgataagatcagatgggcgtctagatgggactatattctggagtctatgcctcatacccacattcagtggtttagcattatgaattccctggtcattgttctcttcttatctggaatggtagctatgattatgttacggacactgcacaaagatattgctagatataatcagatggactctacggaagatgcccaggaagaatttggctggaaacttgttcatggtgatatattccgtcctccaagaaaagggatgctgctatcagtctttctaggatccgggacacagattttaattatgacctttgtgactctatttttcgcttgcctgggatttttgtcacctgccaaccgaggagcgctgatgacgtgtgctgtggtcctgtgggtgctgctgggcacccctgcaggctatgttgctgccagattctataagtcctttggaggtgagaagtggaaaacaaatgttttattaacatcatttctttgtcctgggattgtatttgctgacttctttataatgaatctgatcctctggggagaaggatcttcagcagctattccttttgggacactggttgccatattggccctttggttctgcatatctgtgcctctgacgtttattggtgcatactttggttttaagaagaatgccattgaacacccagttcgaaccaatcagattccacgtcagattcctgaacagtcgttctacacgaagcccttgcctggtattatcatgggagggattttgccctttggctgcatctttatacaacttttcttcattctgaatagtatttggtcacaccagatgtattacatgtttggcttcctatttctggtgtttatcattttggttattacctgttctgaagcaactatacttctttgctatttccacctatgtgcagaggattatcattggcaatggcgttcattccttacgaggggctttactgcagtttatttcttatctatgcagtacactactt

SEQ ID NO: 1561 - DNA, 1528 bp, Homo sapiens
  misc_feature (2)..(2): n equals a,t,g, or c
tnttgcaaaaasctatttaggtgacactatagaaggtacgcctgcaggtaccggtccggaattcccgggtcgacccacgcgtccgagcggatgccgtggggtttacagcaggaaaatccgtggagacagcagatccgagaagcggcgatgtttgcgtagaaccctgtacgtgcttccttcggcctgtcgctcttcccttctctctgaccagcaccatgcttctcctggtgacaagccttctgctctgtgagttaccacacccagcattcctcctgatcccagagaaatcggatctgcgaacagtggcaccagcctctagtctcaatgtgaggtttgactccaggacgatgaatttaagctgggactgccaagaaaacacaaccttcagcaagtgtttcttaactgacaagaagaacagagtcgtggaacccaggctcagtaacaacgaatgttcgtgcacatttcgtgaaatttgtctgcatgaaggagtcacatttgaggttcacgtgaatactagtcaaagaggatttcaacagaaactgctttatccaaattcaggaagggagggtaccgctgctcagaatttctcctgtttcatctacaatgcggatttaatgaactgtacctgggcgaggggtccgacggccccccgtgacgtccagtattttttgtacatacgaaactcaaagagaaggagggagatccggtgtccttattacatacaagactcaggaacccatgtgggatgtcacctggataacctgtcaggattaacgtctcgcaattactttctggttaacggaaccagccgagaaattggcatccaattctttgattcacttttggacacaaagaaaatagaacgattcaaccctcccagcaatgtcaccgtacgttgcaacacgacgcactgcctcgtacggtggaaacagcccaggacctatcagaagctgtcgtacctggactttcagtaccagctggacgtccacagaaagaatacccagcctggcacggaaaacctactgattaatgtttctggtgatttggaaaatagatacaactttccaagctctgagcccagagcaaaacacagtgtgaagatcagagctgcagacgtccgcatcttgaattggagctcctggagtgaagccattgaatttggttctgacgacgggaacctcggctctgtgtacatttatgtgctcctaatcgtrggaacccttgtctgtggcatcgtcctcggcttcctctttaaaaggttccttaggatacagcggctgttcccgccagttccacagatcaaagacaaactgaatgataaccatgaggtggaagacgagatcatctgggaggaattcaccccagaggaagggaaaggctaccgcgaagaggtcttgaccgtgaaggaaattacctgagacccagagggtgtaggaatggcatggacatctccgcctccgcgacacrggggaactgttttcttgatgatgctgtgaacctttatatcattttctatgtttttatttaa

SEQ ID NO: 1562 - DNA, 222 bp, Homo sapiens
  misc_feature (166)..(166): n equals a,t,g, or c
gttacagcggctgttcccgccagttccacagatcaaagacaaactgaatgataaccatgaggtggaagaytttgatcatctgkgaggaattcaccccagaggaagggaaaggctaccgcgaagaggtcttgaccgtgaaggaaattacctgagacccagagggtgnaggaatggcatggacatctccgcctccgcgacacgggggaactgttttcttgatga

SEQ ID NO: 1563 - DNA, 564 bp, Homo sapiens
gtctccgagagaagaaaagcaggtggaaggagaggaagcggatgccgtggggtttacagcaggaaaatccgtggagacagcagatccgagaagcggcgatgtttgcgtagaaccctgtacgtgcttccttcggcctgtcgctcttcccttctctctgaccagcaccatgcttctcctggtgacaagccttctgctctgtgagttaccacacccagcattcctcctgatcccagagaaatcggatctgcgaacagtggcaccagcctctagtctcaatgtgaggtttgactccaggacgatgaatttaagctgggactgccaagaaaacacaaccttcagcaagtgtttcttaactgacaagaagaacagagtcgtggaacccaggctcagtaacaacgaatgttcgtgcacatttcgtgaaatttgtctgcatgaaggagtcacatttgaggttacgtgaatactagtcaagaggatttcaacagaaactgctttatccaaatttcggaagggagggtaccgctgctcagaatttctcctgtttcatctacaatgcggatttaa

SEQ ID NO: 1564 - DNA, 818 bp, Homo sapiens; identical to SEQ ID NO: 706
  misc_feature (687)..(687): n equals a,t,g, or c
  misc_feature (712)..(712): n equals a,t,g, or c

SEQ ID NO: 1565 - DNA, 948 bp, Homo sapiens
catgggcggagactgcaggcttctgggcctgagagggctggagctggctttccggagccgggggcggggcgcgggcgggcctcagctgtggttactggtgacaggtcgcctgactgggctcctccccgggcccgccccgacaggtttgtcttgtgaccgcgggcggccgctgcttctttcccgagcttggaacttcgttatccgcgatgcgtttcctggcagctacattcctgctcctggcgctcagcaccgctgcccaggccgaaccggtgcagttcaaggactgcggttctgtggatggagttataaaggaagtgaatgtgagcccatgccccacccaaccctgccagctgagcaaaggacagtcttacagcgtcaatgtcaccttcaccagcaatattcagtctaaaagcagcaaggccgtggtgcatggcatcctgatgggcgtcccagttccctttcccattcctgagcctgatggttgtaagagtggaattaactgccctatccaaaaagacaagacctatagctacctgaataaactaccagtgaaaagcgaatatccctctataaaactggtggtggagtggcaacttcaggatgacaaaaaccaaagtctcttctgctgggaaatcccagtacagatcgtttctcatctctaagtgcctcattgagttcggtgcatctggccaatgagtctgctgagactcttgacagcacctccagctctgctgcttcaacaacagtgacttgctctccaatggtatccagtgattcgttgaagaggaggtgctctgtagcagaaactgagctccgggtggctggttctcagtggttgtctcatgtctctttttctgtcttaggtggtttcattaaatgcagcacttggttagcaaaaaaaaaaaaaaaaaaaaaaaaaaaaaaaaaaaaaaaagggcggccgctcgc

SEQ ID NO: 1566 - DNA, 818 bp, Homo sapiens; identical to SEQ ID NO: 64
  misc_feature (797)..(797): n equals a,t,g, or c
  misc_feature (810)..(811): n equals a,t,g, or c

SEQ ID NO: 1567 - DNA, 1209 bp, Homo sapiens; identical to SEQ ID NO: 1075

SEQ ID NO: 1568 - DNA, 1177 bp, Homo sapiens; identical to SEQ ID NO: 271

SEQ ID NO: 1569 - DNA, 1107 bp, Homo sapiens
cccccgagatctgaaggtgaagagcttctggccaaaatgattcagcagcaaaacactcccctccccagcaccacgcaggcagccccctagccctgcccctgccccgtcccacagtggtttgcagggtggggttccatgctgtggccctggcacctgcccctgggctgggacagcccactgttccatgctgcccaagaaggctcagcacaggcacaaaccattgcccggcactggcccgtgctgcctgagaaggattggcacgggcacagaccactgcccccacctgccctgcgccatctacccaagaaggctcggcacgggcaccaaccactgcctccaactgccccatgctgcctgagaaggcactgcacggccacccccaactgccccgcactgtccctacccgggcagccatgcgagcggctggaactctgctggccttctgctgcctggtcttgagcaccactgggggcccttccccagatacttgttcccaggaccttaactcacgtgtgaagccaggatttcctaaaacaataaagaccaatgacccaggagtcctccaagcagccagatacagtgttgaaaagttcaacaactgcacgaacgacatgttcttgttcaaggagtcccgcatcacaagggccctagttcagatagtgaaaggcctgaaatatatgctsgaggtggaaattggcagaactacctgcaagaaaaaccagcacctgcgtctggatgactgtgacttccaaaccaaccacaccttgaagcagactctgagctgctactctgaagtctgggtcgtgccctggctccagcacttcgaggtgcctgttctccgttgtcactgacccccgcctcttcagcaagaccacagccatgacaaacaccaggatgcatgctccttgtcccctcccacccgcctcatgacccagcctcacagaccctctcaggcctctgacgagtgagcgggtgaagtgccactgggtcaccgcagggcagctggaatggcagcatggtagcrcctcctaacagattaaatagatcacatttgcttctaaaaaaaaaaaaaaaaaaaaaaaaaaaaaaaaaaaaaaaaaaaaaaaa

SEQ ID NO: 1570 - DNA, 1517 bp, Homo sapiens
  misc_feature (1506)..(1506): n equals a,t,g, or c
  misc_feature (1509)..(1510): n equals a,t,g, or c
  misc_feature (1512)..(1515): n equals a,t,g, or c
  misc_feature (1517)..(1517): n equals a,t,g, or c
tagaactagtggatcccccggtctgcaggaattcggcacgagcccakmggaagccaagccaccaggccccccagcgtccacgcggagcatgaacattgaggatggcgcgtgcccgcggctccccgtgccccccgctgccgcccggtaggatgtcctggccccacggggcattgctcttcctctggctcttctccccacccctgggggccggtggaggtggagtggccgtgacgtctgccgccggagggggctccccgccggccacctcctgccccgtggcctgctcctgcagcaaccaggccagccgggtgatctgcacacggagagacctggccgaggtcccagccagcatcccggtcaacacgcggtacctgaacctgcaagagaacggcatccaggtgatccggacggacacgttcaagcacctgcggcacctggagattctgcagctgagcaagaacctggtgcgcaagatcgaggtgggcgccttcaacgggctgcccagcctcaacacgctggagctttttgacaaccggctgaccacggtgcccacgcaggccttcgagtacctgtccaagctgcgggagctctggctgcggaacaaccccatcgagagcatcccctcctacgccttcaaccgcgtgccctcgctgcggcgcctggacctgggcgagctcaagcggctggaatacatctcggaggcggccttcgaggggctggtcaacctgcgctacctcaacctgggcatgtgcaacctcaaggacatccccaacctgacggccctggtgcgcctggaggagctggagctgtcgggcaaccggctggacctgatccgcccgggctccttccagggtctcaccagcctgcgcaagctgtggctcatgcacgcccaggtagccaccatcgagcgcaacgccttcgacgacctcaagtcgctggaggagctcaacctgtcccacaacaacctgatgtcgctgccccacgacctcttcacgcccctgcaccgcctcgagcgcgtgcacctcaaccacaacccctggcattgcaactgcgacgtgctctggctgagctggyggctcaaggagacggtgcccagcaacacgacgtgctgcgcccgctgtcatgcgcccgccggcctcaaggggcgctacattggggagctggaccagtcgcatttcacctgctatgcgcccgtcatcgtggagccgmccacggacctcaacgtcaccgagggcatggctgccgagctcaaatgccgcacgggcacctccatgacctccgtcaactggctgacgcccaacggcaccctcatgacccacggstcctaccgcgtgcgcatctccgtcctgcatgacggcacgcttaacttcaccaacgtcaccgkgcaggacacgggccagtacacgtgcatggtgacgaactcagccggcamcaccacgctcggccacgcycaagtctcggccgggacccgggcggscggggcmccggcarcgcggggcggccggntanntnnnngn

SEQ ID NO: 1571 - DNA, 1002 bp, Homo sapiens
gcgaattgggtaccgggccccccctcgaggcggtgcaggggcgtgaagaggtcgtggggcagcgacatcaggttgttgtgggacaggttgagctcctccagcgacttgaggtcgtcgaaggcgttgcgctcgatggtggctacctgggcgtgcatgagccacagcttgcgcaggctggtgagaccctggaaggagcccgggcggatcaggtccagccggttgcccgacagctccagctcctccaggcgcaccagggccgtcaggttggggatgtccttgaggttgcacatgcccaggttgaggtagcgcaggttgaccagcccctcgaaggccgcctccgagatgtattccagccgcttgagctcgcccaggtccaggcgccgcagcgagggcacgcggttgaaggcgtaggaggggatgctctcgatggggttgttccgcagccagagctcccgcagcttggacaggtactcgaaggcctgcgtgggcaccgtggtcagccggttgtcaaaaagctccagcgtgttgaggctgggcagcccgttgaaggcgcccacctcgatcttgcgcaccaggttcttgctcagctgcagaatctccaggtgccgcaggtgcttgaacgtgtccgtccggatcacctggatgccgttctcttgcaggttcaggtaccgcgtgttgaccgggatgctggctgggacctcggccaggtctctccgtgtgcagatcacccggctggcctggttgctgcaggagcaggccacggggcaggaggtggccggcggggagccccctccggcggcagacgtcacggccactccacctccaccggcccccaggggtggggagaagagccagaggaagagcaatgccccgtggggccaggacatcctaccgggcggcagcggggggcacggggagccgcgggcacgcgccatcctcaatgttcatgctccgcgtggacgctggggggcctggtggcttggcttccgctgggctcgtgcc

SEQ ID NO: 1572 - DNA, 763 bp, Homo sapiens
cccacgcgtccgcaaccactgcctccaactgccccatgctgcctgagaaggcactgcacggccacccccaactgccccgcactgtccctacccgggcagccatgcgagcggctggaactctgctggccttctgctgcctggtcttgagcaccactgggggcccttccccagatacttgttcccaggaccttaactcacgtgtgaagccaggatttcctaaaacaataaagaccaatgacccaggagtcctccaagcagccagatacagtgttgaaaagttcaacaactgcacgaacgacatgttcttgttcaaggagtcccgcatcacaagggccctagttcagatagtgaaaggcctgaaatatatgctggaggtggaaattggcagaactacctgcaagaaaaaccagcacctgcgtctggatgactgtgacttccaaaccaaccacaccttgaagcagactctgagctgctactctgaagtctgggtcgtgccctggctccagcacttcgaggtgcctgttctccgttgtcactgacccccgcctcttcagcaagaccacagccatgacaaacaccaggatgcatgctccttgtcccctcccacccgcctcatgacccagcctcacagaccctctcaggcctctgacgagtgagcgggtgaagtgccactgggtcaccgcagggcagctggaatggcagcatggtagcacctcctaacagattaaatagatcacatttgcttctaaaaaaaaaaaaaaaa

SEQ ID NO: 1573 - DNA, 902 bp, Homo sapiens
gcggccgccctttttttttttttttttttttttacaaaggcattttattttagtaaacaaaatactggttattattattttttttaattttaattttacctttttttttttggagacgcagtcgctctgtcacccaggctggagggcagtggcacgacctaggctcactgcaacctccacctcccggattcaagcaattctcctgcctcagcctcccgagtagctgggattacagacgcgcgccactacacctggctaatttttatatttttagtagagacaggattttaccatgttggccaggctggtctcaaactcccgatctcaggcgatccactcgcctcggcctcccaaagtgctgggatttcaggtaaaagccagcatacccggccagtactggttcttttaaaaacatatacaaattcacactattttaagtgaaaggtctaggttgggagtttatcctctgacaaattattcaataattaagtctttcttctctttcttctcagctggagtccactcaagctgacatttacatggcagaatcttcagttatcttttttctctgattgcttcttcctttcagcctccagtttttgttgttttgcctccaacctttttctttgatacattttcaccccagcaaatgtcaggcagagaattaatgtttttgctgccaagatatacagcagcaggggcacgtgctcaagaaccttccaattcatggtagactgtgaattcactcctgatcaacacaagcccccaacagacaagtacatgagaggcagctggaaggtctgattgctcccggcagcggaggctccagcgccyggmcgcgtgggtcgacccgggaattccgggccggtacctgcaggagtccttctataggtgatgtcccg

SEQ ID NO: 1574 - DNA, 835 bp, Homo sapiens
tttttttttttttttttttttttacaaaggcattttattttagtaaacaaaatactggttattattattttttttaattttaattttacctttttttttttggagacgcagtcgctctgtcacccaggctggagggcagtggcacgacctaggctcactgcaacctccacctcccggattcaagcaattctcctgcctcagcctcccgagtagctgggattacagacgcgcgccactacacctggctaatttttatatttttagtagagacaggattttaccatgttggccaggctggtctcaaactcccgatctcaggcgatccactcgcctcggcctcccaaagtgctgggatttcaggtaaaagccagcatacccggccagtactggttcttttaaaaacatatacaaattcacactattttaagtgaaaggtctaggttgggagtttatcctctgacaaattattcaataattaagtctttcttctctttcttctcagctggagtccactcaagctgacatttacatggcagaatcttcagttatcttttttctctgattgcttcttcctttcagcctccagtttttgttgttttgcctccaacctttttctttgatacattttcaccccagcaaatgtcaggcagagaattaatgtttttgctgccaagatatacagcagcaggggcacgtgctcaagaaccttccaattcatggtagactgtgaattcactcctgatcaacacaagcccccaacagacaagtacatgagaggcagctggaaggtctgattgctcccggcagcggaggctccagcgcccggacgcgtggg

SEQ ID NO: 1575 - DNA, 606 bp, Homo sapiens
gggtcgacccacgcgtccggcggcgctggcatcattcggcgccctggcgctactcctgctgtccagcctctcctgctgctcagcagaggcctgcgtggagccccagatcaccccttcctactacaccacctcggatgctgtcatttccactgagactgttttcatcgtggagatctccctgacgtgcaagaacagggtccagaacatggctctttatgctgatgtcagtggaaagcagtttcccgtcacccggggccaggacgtgggacgctatcaggtgtcctggagcgtagaccacaagagcgcccgcgcaggcacatatgaggtcagattcttcgatgaggagtcctacagcctcctgaggaaggctcagagaaataatgaggatatttccgtcatcccgcccctgttcacagtcagcgtggaccaccggggcacctggaatgggccctgggtctctaccgaggtgttggctgctgccatcggcctggtgatctactacctggccttcagtgccaagagtcacatccaggcctgaaggcagcaccccggggctgtggctactttcaataaacagctgttggctctgaccggcaaaaaaaaaaa

SEQ ID NO: 1576 - DNA, 1579 bp, Homo sapiens
gattttcttttctcctattttgctttacttttaaaaatattttctttaacttcatttttaatattgctagtaaatttttaaacattcggctttgctgtttttaatttctgaaagttctttctaattctcatttttttaatcacctcctgttcctgttttacacacacaatgttttatgtctttaaggatgttaattacagttctttcagatttttcttttatttcctgtgttgctttgtttcctctcagttccttatctctgtgtgttttgttttggtttctttctcaggttgaagcatgtcttatgatcttgtgctctggttatatttgttatttatttatttattttaactttaatccattttatttgagtctcaaaaaaaaaaaaaaaaaaaaaatkgggaaacccctacctgtctgtacctgtaggtcttttctctggggtctggaaraaraatccttcaatatcttgccttctggtaatctgaragcagggcgagaaaaggaagatcagagttccacccttaaatctgtaggttttcactcccccactctcctttgcagtcccgtggagtctccatctgagccctttcctagtccaggcatcccgatgttggtggatggcccatctgagcggccagccctgtgcttcttgctgttggctgtggcaatgtctttcttcggctcagctctatccatagatgaaacacgggcgcatctgttgttgaaagaaaagatgatgcggctgggggggcggctggtgctgaayaccaaggaggagctggccaatgagaggctcatgacgctcaaaatcgctgagatgaaggaggccatgaggaccctgatattcccacccagcatgcactttttccaggccaagcatctcattgagagaagtcaagtgtttaatattctaaggatgatgccaaaaggggctgccttgcacctccatgacattggcatcgtgactatggactggctggtgaggaatgtcacctacaggcctcactgccacatctgtttcaccccaagggggatcatgcagttcagatttgctcacccaactccccgtccatcagaaaaatgttccaagtggattctgctggaggattatcggaagcgggtgcagaacgtcactgagtttgatgacaggtgagtagtagttcagaaagcacatgtcccaggcctgtcatggggtggcagtgggtaggtgtctcccttggtacaaacctatagataaaaatctggctttaataaaacatgaggcaaggctgagtgcggtggttcacgcctataatcccagcactttgggaggccaaggcgagcggatcacttgagcccaggagttgccagtctggtcaacatggtgaaagcccatctctactaaaaatacaaaaaattagccgggcatggtggcgggcacctgtagtcccagctactcgggaggctgaggcaggagaatggtgtgaacccaggaggcggagctcgcagtgagccgagattgcaccaccgtgctccagcctgggcagcagagcgagactccgtctcaaaaaaaaaaaaaaaaaaaaagggcggccgc

SEQ ID NO: 1577 - DNA, 151 bp, Homo sapiens
  misc_feature (72)..(72): n equals a,t,g, or c
tctcttctctctctgtacacttttcctgggtggtctcatccattcctttgctttttcataccatttatttgntaatgattcccacatttatttatgcacttggagagctcacaggaatctcagaaactgatgagggacaattctgaaccct

SEQ ID NO: 1578 - DNA, 263 bp, Homo sapiens
caaagcagaaattttcagtgcaagtcttgatgctgcgccgtcccccactccctacatcagaacgcatccctcatctggactccagcggtggcttcttgatgctgcgcggtcccccactccctacatcagaatgcatcccgcatccagactccagcggtggcgctctacctgcacgctgttgccaagtccaagctaccatactcctgcctgagctatgacaacagcctcctcactgatctcccctttcttccctttgcctcctc

SEQ ID NO: 1579 - DNA, 904 bp, Homo sapiens
  misc_feature (344)..(344): n equals a,t,g, or c
gctggtgccgaatgtcacctacaggcctcactgccacatctgtttcaccccaagggggatcatgcagttcagatttgctcacccaactccccgtccatcagaaaaatgttccaagtggattctgctggaggattatcggaagcgggtgcagaacgtcactgagtttgatgacagcttgctgaggaatttcactctggtgacccagcacccggaggtgatttacacaaaccaaaatgttgtctggtcgaaatttgaaaccatcttcttcaccatctctggtctcatccattacgcaccaagtgttcagagactatgtcttccggagcatgcaggaattctacgangacaacgtgctctacatggagatcagagccaggctgctgccggtgtatgagctcagtggagagcaccatgacgaagagtggtcagtgaagacttaccaggaagtagctcagaagtttgtggaaactcaccctgagtttattggaatcaaaatcatttattcggatcacagatccaaagatgtggctgtcatcgcagaatccatccgaatggccatggggctccgaatcaagttccccacggtggtggcagggtttgacctggtggggcatgaggacactggccactccttgcatgactacaaggaagctctgatgatccccgccaaggatggcgttaagctgccttacttcttccacgccggagaaacagactggsagggtacttcatagacaggaacattctggatgctctgatgctgaacactaccagaatcggccatggatttgctttgagcaaacaccccgcagcaggacttactcctggaaaaaggacatcccatagaakctgkcccatctctaaccaggtgctgaaactggtgtctgacttgaggaaccaccct

SEQ ID NO: 1580 - DNA, 1233 bp, Homo sapiens; identical to SEQ ID NO: 265

SEQ ID NO: 1581 - DNA, 1209 bp, Homo sapiens; identical to SEQ ID NO: 1075

SEQ ID NO: 1582 - DNA, 631 bp, Homo sapiens
  misc_feature (592)..(592): n equals a,t,g, or c
  misc_feature (627)..(627): n equals a,t,g, or c
aggtgaaggcccgtggggctcgagcgcatctgcccgccctagtcggggaagagcaggaagccggagaagacgctgtcagagccctggatgcccaccatgtcgtagtagtcattgacagccagccacacctcctcgcccacctgcaacctcagcagcacaccgcccgagttgacctgattggttttggacgtgtggccacagaaggtgaccactttgacgccgctgcggtacagcagcacgcacaggttggctgtatgcgacgcgtggtagacaaagtagtagaggccggggactttgcaggtgaacttgccagtgctcgtgtcataatctccctgcgggttggtgaggaccgcgttgaatctgatcaggctgttgggtgcagggggctggtgggtctgccgagtgaccgtgaacactgactggaatttctgcttgtatctgccctcctcacctggctctccagggatgcccatggggccgggcacccctggcatcccagggggtcccatggggccatttttcccaggatggccgggtaagccgggttctcccttctgccctttgggtcctcgggtcccgggaagaagggaancgagcttttgctttacatcccccgtcccgtaatanaaat

SEQ ID NO: 1583 - DNA, 1602 bp, Homo sapiens
  misc_feature (1550)..(1550): n equals a,t,g, or c
  misc_feature (1556)..(1556): n equals a,t,g, or c
  misc_feature (1563)..(1563): n equals a,t,g, or c
  misc_feature (1577)..(1577): n equals a,t,g, or c
gcttttaggtgacactatagaaggtacgcctgcaggtaccggtccggaattcccgggtcgacccacgcgtccgcccacgcgtccgcccacgcgtccgggaggacctgtctggttattatacagacgcataactggaggtgggatccacacagctcagaacagctggatcttgctcagtctctgccaggggaagattccttggaggaggccctgcagcgacatggagggagctgctttgctgagagtctctgtcctctgcatctggatgagtgcacttttccttggtgtgggagtgagggcagaggaagctggagcgagggtgcaacaaaacgttccaagtgggacagatactggagatcctcaaagtaagcccctcggtgactgggctgctggcaccatggacccagagagcagtatctttattgaggatgccattaagtatttcaaggaaaaagtgagcacacagaatctgctactcctgctgactgataatgaggcctgraacggattcgtggctgctgctgaactgcccaggaatgaggcagatgagctccgtaaagctctggacaaccttgcaagacaaatgatcatgaaagacaaaaactggcacgataaaggccagcagtacagaaactggtttctgaaagagtttcctcggttgaaaagtragcttgaggataacataagaaggctccgtgcccttgcagatggggttcagaaggtccacaaaggcaccaccatcgccaatgtggtgtctggctctctcagcatttcctctggcatcctgaccctcgtcggcatgggtctggcacccttcacagagggaggcagccttgtactcttggaacctgggatggagttgggaatcacagcagctttgaccgggattaccagcagtaccatagactacggaaagaagtggtggacacaagcccaagcccacgacctggtcatcaaaagccttgacaaattgaaggaggtgaaggagtttttgggtgagaacatatccaactttctttccttagctggcaatacttaccaactcacacgaggcattgggaaggacatccgtgccctcagacgagccagagccaatcttcagtcagtaccgcatgcctcagcctcacgcccccgggtcactgagccaatctcagctgaaagcggtgaacaggtggagagagttaatgaacccagcatcctggaaatgagcagaggagtcaagctcacggatgtggcccctgtaagcttctttcttgtgctggatgtagtctacctcgtgtacgaatcaaagcacttacatgagggggcaaagtcagagacagctgaggagctgaagaaggtggctcaggagctggaggagaagctaaacattctcaacaataattataagattctgcaggcggaccaagaactgtgaccacagggcagggcagccaccaggagagatatgcctggcaggggccaggacaaaatgcaaacttttttttttttctgagacagagtcttgctctgtcgccargtkggarcttgcagtgagcccgagatatcgncactgnacttcancctgggtgacagancgagacttcatctcaaaaaaaaaaa

SEQ ID NO: 1584 - DNA, 568 bp, Homo sapiens
  misc_feature (565)..(565): n equals a,t,g, or c
caatgagaaggccaggaaaagaaagagctgaaaatggagaaagcccaagagttagaacagttggatacaggagaagaaacagcggctccactacagacccagccccaggttcaatgtcctccgaagaatgaagtctttccctggtgatggtcccctgccctgtctttccagcatccactctcccttgtcctcctgggggcatatctcagtcaggcagcggcttcctgatgatggtcattggggtggttgtcatgtgatgggtcccctccaggttactaaagggtgcatgtcccctgcttgaacactgaagggcaggtggtgggccatggccatggtccccagctgaggagcaggtgtccctgagaacccaaacttcccagagagtatgtgagaaccaaccaatgaaaacagtcccatcgctcttacccggaagaaaagcagaaattagcatgaaagcagtttagcattgggaggaaagctcagatctctagagctgtcttgtcgccgcccaggattgacctgtgkgtaagtcccaataaactcacctactcatcaagcacaaaanaaa

SEQ ID NO: 1585 - DNA, 2196 bp, Homo sapiens; identical to SEQ ID NO: 272

SEQ ID NO: 1586 - DNA, 1828 bp, Homo sapiens
gttcaaatccacgttgatacaatgaaggtaattaatgatsctatccatggccacattgagctccaccacctcccagctgtttgatgtatcgaagacgttgaaattgaggtgtatcaatgattcggacgaggagagggtggagctcaatgtggccatggataggggtggggtatctagcaggatgtctagttcacgcactgggtgaaaaacaaccagagctgcagataagtgaacgagatgttctctgtgttcagattgctggactttgtcatgatctcggtcatgggccattttctcacatgtttgatggacgatttattccacttgctcgcccggaggtgaaatggacgcatgaacaaggctcagttatgatgtttgagcaccttattaattctaatggaattaagcctgtcatggaacaatatggtctcatccctgaagaagatatttgctttataaaggaacaaattgtaggaccacttgaatcacctgtcgaagattcattgtggccatataaagggcgtcctgaaaacaaaagcttcctttatgagatagtatctaataaaagaaatggcattgatgtggacaaatgggattattttgccagggactgccatcatcttggaatccaaaataattttgattacaagcgctttattaagtttgcccgtgtctgtgaagtagacaatgagttgcgtatttgtgctagagataaggaagttggaaatctgtatgacatgttccacactcgcaactctttacaccgtagagcttatcaacacaaagttggcaacattattgatacaatgattacagatgctttcctcaaagcagatgactacatagagattacaggtgctggaggaaaaaagtatcgcatttctacagcaattgacgacatggaagcctatactaagctgacagataacatttttctggagattttatactctactgatcccaaattgaaagacgcacgagagattttaaaacaaattgaataccgtaatctattcaagtatgtgggtgagacgcagccaacaggacaaataaagattaaaagggaggactatgaatctcttccaaaagaggttgccagtgctaaacccaaagtattgctagacgtgaaactgaaggctgaagattttatagtggatgttatcaacatggattatggaatgcaagaaaagaatccaattgatcatgttagcttctattgtaagactgcccccaacagagcaatcaggattactaaaaaccaggtttcacaacttctgccagagaaatttgcagagcagctgattcgagtatattgtaagaaggtggacagaaagagtttgtatgccgcaagacaatattttgttcagtggtgtgcagacagaaatttcaccaagccgcaggatggcgatgttatagccccactcataacacctcaaaaaaaggaatggaacgacagtacttcagtccaaaatccaactcgcctccgagaagcatccaaaagcagagtccagctttttaaagatgacccaatgtgaatgtctgtagtcagttgtttacaaactccctctcctgcacaattcatttagaggcttcaatcatagaattctgcaaattaatgacaactcatgctttaattttgtattttgaatgtacacgcatgctgaagctaagtaacttttaatcaaagaaataagatggtattaggcaaatcttactatactatgaaaagcattaccttgcctatttttaatattattaaagcctttctccttcaaaaaaaaaaaaaaaaaaaaaaaaaaaaaaaaaaaaaaaaaaaaaaaaaactcga

SEQ ID NO: 1587 - DNA, 2471 bp, Homo sapiens
  misc_feature (1214)..(1214): n equals a,t,g, or c
  misc_feature (2468)..(2468): n equals a,t,g, or c
cccggcgccgaggttcttgactgctgtgccggacgccaggtgtagccatgcagcgagccgattccgagcagccctccaagcgtccccgttgcgatgacagcccgagaaccccctcaaacaccccttccgcagaggcagactggtccccgggcctggaactccatcccgactacaagacatggggtccggagcaggtgtgctccttcctcaggcgcggtggctttgaagagccggtgctgctgaagaacatccgagaaaatgaaatcacaggcgcattactgccttgtcttgatgagtctcgttttgaaaatcttggagtaagttccttgggggagaggaagaagctgcttagttatatccagcgattggttcaaatccacgttgatacaatgaaggtaattaatgatcctatccatggccacattgagctccaccacctcccagctgtttgatgtatcgaagacgttgaaattgaggtgtatcaatgattcggacgaggagagggtggagctcaatgtggccatggataggggtggggtatctagcaggatgtctagttcacgcactgggtgaaaaacaaccagagctgcagataagtgaacgagatgttctctgtgttcagattgctggactttgtcatgatctcggtcatgggccattttctcacatgtttgatggacgatttattccacttgctcgcccggaggtgaaatggacgcatgaacaaggctcagttatgatgtttgagcaccttattaattctaatggaattaagcctgtcatggaacaatatggtctcatccctgaagaagatatttgctttataaaggaacaaattgtaggaccacttgaatcacctgtcgaagattcattgtggccatataaagggcgtcctgaaaacaaaagcttcctttatgagatagtatctaataaaagaaatggcattgatgtggacaaatgggattattttgccagggactgccatcatcttggaatccaaaataattttgattacaagcgctttattaagtttgcccgtgtctgtgaagtagacaatgagttgcgtatttgtgctagagataaggaagttggaaatctgtatgacatgttccacactcgcaactctttacaccgtagagcttatcaacacaaagttggcaacattattgatacaatgattacagatgctttcctcaaagcagatgactacatanagattacaggtgctggaggaaaaaagtatcgcatttctacagcaattgacgacatggaagcctatactaagctgacagataacatttttctggagattttatactctactgatcccaaattgaaagacgcacgagagattttaaaacaaattgaataccgtaatctattcaagtatgtgggtgagacgcagccaacaggacaaataaagattaaaagggaggactatgaatctcttccaaaagaggttgccagtgctaaacccaaagtattgctagacgtgaaactgaaggctgaagattttatagtggatgttatcaacatggattatggaatgcaagaaaagaatccaattgatcatgttagcttctattgtaagactgcccccaacagagcaatcaggattactaaaaaccaggtttcacaacttctgccagagaaatttgcagagcagctgattcgagtatattgtaagaaggtggacagaaagagtttgtatgccgcaagacaatattttgttcagtggtgtgcagacagaaatttcaccaagccgcaggatggcgatgttatagccccactcataacacctcaaaaaaaggaatggaacgacagtacttcagtccaaaatccaactcgcctccgagaagcatccaaaagcagagtccagctttttaaagatgacccaatgtgaatgtctgtagtcagttgtttacaaactccctctcctgcacaattcatttagaggcttcaatcatagaattctgcaaattaatgacaactcatgctttaattttgtattttgaatgtacacgcatgctgaagctaagtaacttttaatcaaagaaataagatggtattaggcaaatcttactatactatgaaaagcattaccttgcctatttttaatattattaaagcctttctccttcagtagtctattttcttagaataacaactcttttatctattctgaactctattttttttcttttttaagagacaaggttttgctctgttgcccagcttggactcgaactttcctgggctcaagcgaccctcctgcctcagccccccaagtagctgggactaaagtcatgtgccaccacacccagcttactctgaacttttatgacagatgattgttttttgtttttaatgtagaaatgagacaagggtacaaattggaactagaaattgacattgtcattgacaaacaggctaaaaacaaacatcaaatcctggccccgtgaagagtncct

SEQ ID NO: 1588 - DNA, 3051 bp, Homo sapiens
  misc_feature (3048)..(3048): n equals a,t,g, or c
gcctcccccgccccgcgcccgccaactcccagctcgcggccctgattggtcgccgcattcccgctctccttcccgaaccgccattttgaaaatcttgttgattctggggagccgagcgcgcggcgcgagcgtcacgccagacagcggcccgcgcgccttctcctcggcgtcggccgccgccgcctcccagaacctcctcgtgccctcgcgtgccaggcccgcggcggccgaaatccgcggttcacagcatgtccgcctcggcccctgctgcggagggggagggaacccccacccagcccgcgtccgagaaagaacccgaaatgcccggtcccagagaggagagcgaggaggaagaggacgaggacgacgaggaggaggaggaggaggaaaaagaaaagagtctcatcgtggaaggcaagagggaaaagaaaaaagtagagaggttgacaatgcaagtctcttccttacagagagagccatttacaattgcacaaggaaaggggcagaaactttgtgaaattgagaggatacatttttttctaagtaagaagaaaaccgatgaacttagaaatctacacaaactgctttacaacaggccaggcactgtgtcctcattaaagaagaatgtgggtcagttcagtggctttccatttgaaaaaggaagtgtccaatataaaaagaaggaagaaatgttgaaaaaatttagaaatgccatgttaaagagcatctgtgaggttcttgatttggagagatcaggtgtaaatagtgaactagtgaagaggatcttgaatttcttaatgcatccaaagccttctggcaaaccattgccgaaatctaaaaaaacttgtagcaaaggcagtaaaaaggaacggaacagttctggaatggcaaggaaggctaagcgaaccaaatgtcctgaaattctgtcagatgaatctagtagtgatgaagatgaaaagaaaaacaaggaagagtcttcagatgatgaagataaagaaagtgaagaggagccaccaaaaaagacagccaaaagagaaaaacctaaacagaaagctacttctaaaagtaaaaaatctgtgaaaagtgccaatgttaagaaagcagatagcagcaccaccaagaagaatcaaaacagttccaaaaaagaaagtgagtctgaggatagttcagatgatgaacctttaattaaaaagttgaagaaaccccctacagatgaagagttaaaggaaacaataaagaaattactggccagtgctaacttggaagaagtcacaatgaaacagatttgcaaaaaggtctatgaaaattatcctacttatgatttaactgaaagaaaagatttcataaaaacaactgtaaaagagctaatttcttgagatagaggacagagaagatgactcgttcccatagatttgaagatctgatttataccattataccagcaaagagaatgtatttccttttctaaatccttgttaagcaacgttagtagaacttactgctgacctttttatcttgagtgttatgtgaatttgagtttgctgttttaaattgcatttctatgccatttttagtttaaaatcttgcatggcattaattgttccttgcttttatagttgtattttgtacattttggatttctttatataaggtcatagattcttgagctgttgtggtttttagtgcacttaatattagcttgcttaaggcatacttttaatcaagtagaacaaaaactattatcaccaggatttatacatacagagattgtagtatttagtatatgaaatattttgaatacacatctctgtcagtgtgaaaattcagcggcagtgtgtccatcatattaaaaatatacaagctacagttgtccagatcactgaattggaacttttctcctgcatgtgtatatatgtcaaattgtcagcatgacaaaagtgacagatgttatttttgtatttttaaaaaacaattggttgtatataaagtttttttatttcttttgtgcagatcactttttaaactcacataggtaggtatctttatagttgtagactatggaatgtcagtgttcagccaaacagtatgatggaacagtgaaagtcaattcagtgatggcaacactgaaggaacagttaccctgctttgcctcgaaagtgtcatcaatttgtaattttagtattaactctgtaaaagtgtctgtaggtacgttttatattatataaggacagaccaaaaatcaacctatcaaagcttcaaaaactttgggaaagggtgggattaagtacaagcacatttggcttacagtaaatgaactgatttttattaactgcttttgcccatataaaatgctgatatttactggaaacctagccagcttcacgattatgactaaagtaccagattataatgccagaatataatgtgcaggcaatcgtggatgtctctgacaaagtgtgtctcaaaaataatatacttttacattaaagaaatttaatgtttctctggagttggggctcttggctttcagagtttggttaatcagtgttgattctagatgatcaacataatggaccactcctgaatgagacttaattttgtctttcaaatttactgtcttaaatcagtttattaaatctgaattttaaaacatgctgtttatgacacaatgacacatttgttgcaccaattaagtgttgaaaaatatctttgcatcatagaacagaaatatataaaaatatatgttgaatgttaacaggtattttcacaggtttgtttcttgatagttactcagacactagggaaaggtaaatacaagtgaacaaaataagcaactaaatgagacctaataattggccttcgattttaaatatttgttcttataaaccttgtcaataaaaataaatctaaatcactggtgttttaaaaaaaaaaaaaaaaaaaaaagggcggccgctctagaggatccctcgaggggcccaagcttacgcgtgcatgcgacgtcatagctctctccctatagtgagtcgtattaataggagtccaaantgg

SEQ ID NO: 1589 - DNA, 362 bp, Homo sapiens
  misc_feature (270)..(270): n equals a,t,g, or c
  misc_feature (327)..(327): n equals a,t,g, or c
attccagactctcagcctgaaaacactgagaatgtttgcatgctagttttccacatcatatrcaatattattaaaatactcatttggaatagaattccatatgggttaaccagagtactgttgggatggttgtggctatttgcacgtagcagatttcctgcttttattcaaagacaatattactggattttaaaatctgcttttaacattatttttccttttcactatacataggtctatgaaaattatcctacttatgatttaactganagaaaagatttcataaaaacaactgtaaaaagagctaattcttgagatagaggaccnagaagatgacttcgttccatagattgaagatctga

SEQ ID NO: 1590 - DNA, 706 bp, Homo sapiens
  misc_feature (658)..(658): n equals a,t,g, or c
tttcagaataatttagtgacctatagaagtaccctgcagtaccgwtccgaawttcccggtcgacccacgcgtccgctcgctcgggcgcccagtggtcctgccgcctggtctcacctcgccatggttcgtctgcctctgcagtgcgtcctctggggctgcttgctgaccgctgtccatccagaaccacccactgcatgcagagaaaaacagtacctaataaacagtcagtgctgttctttgtgccagccaggacagaaactggtgagtgactgcacagagttcactgaaacggaatgccttccttgcggtgaaagcgaattcctagacacctggaacagagagacacactgccaccagcacaaatactgcgaccccaacctagggcttcgggtccagcagaagggcacctcagaaacagacaccatctgcacctgtgaagaaggctggcactgtacgagtgaggcctgtgagagctgtgtcctgcaccgctcatgctcgcccggctttggggtcaagcagattggtccccaggatcgggcttgararacccttgggtggggtgaatcccccaatcatctttcggggaatcctggtttggccattccttctttggtgcttggkctttatcaaaaagtggccaagaagccaaccataaggnccccccaaacccccaagcaaggaaacccccagggaaaatcaaattttt

SEQ ID NO: 1591 - DNA, 2870 bp, Homo sapiens
  misc_feature (3)..(3): n equals a,t,g, or c
  misc_feature (5)..(5): n equals a,t,g, or c
ttngnttactaggyttttgcaaaaagctatttaggtgacactatagaaggtacgcctgcaggtaccggtccggaattcccgggtcgacccacgcgtccgcctggatagcagctttgtttgtagaggcaggtggtgggagagaccctaggacagcctgagagtaactggacctggtattggtgcggagtggggaatatcccttgtctaaatgcagagcagctgagagaagttagcggggctcttcctccgttctcattgtttcctgctttccttccccacccaccccttcctcagcactctgtgttgtagcctgtactatcctgcttcaagcctccgtgtcccttgtaccttccccctaccttgagttgccagttctttactccctcaaatgttcccatgccacctctggggtttctgttatctgacatccctggctgctttcctggtagatgccattcccagagaggccaacagcgttcccaggcgtggctggctggtccgcatctctcagactcactctgccaggctacagttttgagaataccttttttgttgttgttttgtacctggagaactttttatgaatgagtaaatcttcagaaaggaattcctccacccttactgggttattgtcaggtgtaaacggcctttcagctgagcaatgttcctatgagaaggaagccatttctcttggctcatgaacactgccttttgggtagtatacccacacccagatctgtgaagagacctggaattgaagtctccatgtcgtcaggacttggtggcatgtggatcttgcttgacttgggaaaagagagggtggtggtgaactaataattatggagtccccctaatgtgtcgaacacaatgctagatgatttccatgataataattactcatacttgtgctaagcacttgcgatatcgtacttctcacaacagtccatgaggtactgattattatccccattttctcatgagactaaagctccgagctctaggatagtatacagtggcaagaggaatttacatccaagcactcagatttcaaagcccacattcttaactaccggactattcatattacagagcaggaaaagggtctcagacaggttaagcaacctgcccagagtcacacagctaatgagtagcagaatcaggattcaaacccagagctgtcaaaagcaaaccttatgttccttccactgtcccctgcttccttgcccttcagaaaggtcttggaaacaggggccagaggatgtggtagccacttcactggtgttctgtgtctgaatgggactttctcacaggcaggccatgctgggacctcagccatgggggtggccagggaggtggttgagcagaaggatagctggggacactgactgggggtagagtcacccagtgtctttagacatcctgctgtctaaagcactgtgtccaaagggtatggcacacttatatggacaggtcaccattccaaacaaggaggcccagtgtgtcaataggagaggtcctaaagcaacaaaaagggcggggtgtcttggatgggcttcaggaagggaaagaccgttgtgtctggagctcagagaatgggggctggtgtttgagatgaggctggagattgggcatggcatcctcacgcatgttaaggaattggggactttatccttaacatcctggaagccagtgatcccatggagagtgagaagatctgatctgtgtttcaaaggtcacttgactgccgagcagctggaggcgagttgctcctttaggagactgctgcagttgcctgggtgagaggctagaggggtctggtctatagcagtggcaggggagatggaaagaagagaatgatttgaggggcattcggggggcaaaatcaacaggacctggggggagacgaagggatcaagaatgatgcccagattctgggtgagtggcagtgctgggattgcaggcacacgccaccacgcccggctggtttttgtatttttagtagagacggggtttcaccatgtcagccaggcttttcttgaacttctgatctcaagtgatcctcccgcctcagcctcccaaattgctgggattacaggcgtgagccaccacgcccacctgtaaccattatttttaagattgctaccattggatagttctgtcatggtccaacttttggatatttaaaattgatccctgtgtggctaacagaattaatgtttccaaaaatgttgaaaattatatagttctcttaattccccacctctaactatatttttgggttatttctttaggaacagatgcccaggagtcatattactgagaatctagaaatcttttgcaaagttcttgttatattgccaaattgcttcccaaaagggttgttctaaaccataatttcaccagcaatgtaggggagaaccatttttatgctgcccttgtgagaattgggtatgaaaacatttttaaaatgatttttgatgaggtgaaaataatatttgaatatattttaatttgcctttcccccacttatagtgagcttaaacattttttccttttcctagctgtatttctccctttgttattcgttcttttgtccatttatctactggggagatggggagtgttatctttttagtttatcagttatttgcattttaaatataaccatttgccatattttaacaacgatttttccattaaataattctttttataaaaaaactttaaaaaaaaaaaaaaaaaaaaaaaaaaaaaaaaaaaaaaaaaaaaaaaaaaaaaaaaaaaaaaagggcggccgytytagaggatccctcgaggggcccaagcttacgcgtgcatgcgacgtcatagctctctccctatagtgagtc

SEQ ID NO: 1592 - DNA, 907 bp, Homo sapiens
  misc_feature (16)..(16): n equals a,t,g, or c
  misc_feature (40)..(40): n equals a,t,g, or c
  misc_feature (61)..(61): n equals a,t,g, or c
  misc_feature (434)..(434): n equals a,t,g, or c
  misc_feature (562)..(562): n equals a,t,g, or c
cacggtctttccttcntaagccatcaagccccgctttgtnttagcttcatcccccaacccnacttgggcctccttgtttggaatggtgacctgtccatataagtgtgccataccctttggacacagtgctttagacagcaggatgtctaaagacactgggtgactctacccccagtcagtgtccccagctatccttctgctcaaccacctccctggccacccccatggctgaggtcccagcatggcctgcctgtgagaaagtcccattcagacacagaacaccagtgaagtggctaccacatcctctggcccctgtttccaagacctttctgaagggcaaggaagcaggggacagtgaaggaacataaggtttgcttttgacagctctgggtttgaatcctgattctgctactcattagctgtgtgactctggncaggttgcttaacctgtctgagacccttttcctgctctgtaatatgaatagtccggtagttaagaatgtgggctttgaaatctgagtgcttggatgtaaattcctcttgccactgtatactatcctanagctcggagctttagtctcatgagaaaatggggataataatcagtacctcatggactgttgtgagaagtacgatatcgcaagtgcttagcacaagtatgagtaattattatcatggaaatcatctagcattgtgttcgacacattagggggactccataattattagttcaccaccaccctctcttttcccaagtcaagcaagatccacatgccaccaagtcctgacgacatggagacttcaattccaggtctcttcacagatctgggtgtgggtatactacccaaaaggcagtgttcatgagccaagataaatgtaaatccaatcagggaagttccaatacact

SEQ ID NO: 1593 - DNA, 782 bp, Homo sapiens
  misc_feature (758)..(758): n equals a,t,g, or c
catcattcttgatcccttcgtctccccccaggtcctgttgattttgccccccgaatgcccctcaaatcattctcttctttccatctcccctgccactgctatagaccagacccctctagcctctcacccaggcaactgcagcagtctcctaaaggagcaactcgcctcmagytgctcggcagtcaagtgmcctttgaamcmcagatcagatcttctcactctccatgggatcactggcttccaggatgttaaggataaagtccccaattccttamcatggtgaggatgccatgcccaatctccagcytcatctcaaacaccagcccccattctctgagctccagacacaacggtctttcccttcctgaagcccatccaagacaccccgccstttttgttgctttaggacctctcctattgacacactgggcctccttgtttggaatggtgacctgtccatataagtgtgccataccctttggacacagtgctttagacagcaggatgtctaaagacactgggtgactctacccccagtcagtgtccccagctatccttctgctcaaccacctccctggccacccccatggctgaggtcccagcatggcctgcctgtgagaaagtcccattcagacacagaacaccagtgaagtggctaccacatcctctggcccctgtttccaagacctttctgaagggcaaggaagcaggggacagtggaaggaacataaggtaagcttttgacaggggtttttccnttagatagcccccccatacacggc

SEQ ID NO: 1594 - DNA, 1719 bp, Homo sapiens
  misc_feature (10)..(10): n equals a,t,g, or c
  misc_feature (12)..(12): n equals a,t,g, or c
  misc_feature (14)..(14): n equals a,t,g, or c
  misc_feature (33)..(33): n equals a,t,g, or c
  misc_feature (93)..(93): n equals a,t,g, or c
  misc_feature (135)..(135): n equals a,t,g, or c
  misc_feature (217)..(217): n equals a,t,g, or c
gccaaaaatntngnaacaaactcggccccattnacgcaaatgggccggtaggcgtgtccggtggaggtctatataagcagagctcgtttagtnacccgtcagatcgcctgaagaccgccatccacgctgttttgncctccatagaagacaccgggaccgatccagcctccggactctagcttaggccgcgggacggataacaatttcacacaggaancagctatgaccactaggcttttgcaaaaagctatttaggtgacactatagaaggtacgcctgcaggtaccggtccggaattcccgggtcgacccacgcgtccggcgcggccgttgggcgtgcagcggcgccagtcggcggacgaggggcccccgggagttgctggactgagacatgagcctccaactgtgtggttgggctcggtagcacatcgtgggacttgggtgtgcgcccacagatggtttggccctgcagtgaccagagcagcccaagccgccaccatggtgaaattgctagtggccaaaatcctgtgcatggtgggcgtgttcttcttcatgctgctcggctccctgctccccgtgaagatcatcgagacagattttgagaaggcccatcgctcgaaaaagatcctctctctctgcaacacctttggaggaggggtgtttctggccacgtgcttcaacgctctgctgcccgctgtgagggaaaagctccagaaggtcctgagcctcggccacatcagcaccgactacccgctggccgaaaccatcctcctgctgggcttcttcatgaccgtcttcctggagcagctgatcctgaccttccgcaaggagaagccgtccttcatcgacctggagaccttcaacgccggatcggacgtgggcagcgactcggagtatgagagccccttcatggggggcgcgcggggccacgcgctgtacgtggagccccacggccacggccccagcctgagcgtgcagggcctctcgcgcgccagccccgtgcgcctgctcagcctggccttcgcgctgtcggcccactcggtctttgagggcctggccctgggcctgcaggaggagggggagaaagtggtgagcctgttcgtgggggtggccgtccacgagacactggtggccgtggccctgggcatcagcatggcccggagtgccatgcccctgcgggacgcggccaagctggcggtcaccgtragcgccatgatccccctgggcatcggcctgggcctgggcattgagagcgcccagggcgtgccgggcagcgtggcgtccgtgctgctgcagggcctggcgggcggcaccttcctcttcatcaccttcctggagatcctggccaaggagctggaggagaagagtgaccgtctgctcaaggtcctcttcctggtgctgggctacaccgtcctggccgggatggtcttcctcaagtggtgagcggcctcgccattgtccctgccgccggagcccgccgggagccccgggccggacacaggccgcgtcccccggccgcgcgtcccccaagagcgagcactgtggccctgggccaccacctgtgcacaaggggcctcccgggaccaggctgtgcccccgatcctacaccctgagcctcagagcactgctactttttaaaatacttctttctcttaaaattaccaaaaaaaaaaaaaaaaaaaaaaaaaaaaaaaaaaaaaaaaaaaaaaaaaaaaaaaaa

SEQ ID NO: 1595 - DNA, 1314 bp, Homo sapiens
cccgggagttgctggactgagacatgagcctccaactgtgtggttgggctcggtagcacatcgtgggacttgggtgtgcgcccacagatggtttggccctgcagtgaccagagcagcccaagccgccaccatggtgaaattgctagtggccaaaatcctgtgcatggtgggcgtgttcttcttcatgctgctcggctccctgctccccgtgaagatcatcgagacagattttgagaaggcccatcgctcgaaaaagatcctctctctctgcaacacctttggaggaggggtgtttctggccacgtgcttcaacgctctgctgcccgctgtgagggaaaagctccagaaggtcctgagcctcggccacatcagcaccgactacccgctggccgaaaccatcctcctgctgggcttcttcatgaccgtcttcctggagcagctgatcctgaccttccgcaaggagaagccgtccttcatcgacctggagaccttcaacgccggatcggacgtgggcagcgactcggagtatgagagccccttcatggggggcgcgcggggccacgcgctgtacgtggagccccacggccacggccccagcctgagcgtgcagggcctctcgcgcgccagccccgtgcgcctgctcagcctggccttcgcgctgtcggcccactcggtctttgagggcctggccctgggcctgcaggaggagggggagaaagtggtgagcctgttcgtgggggtggccgtccacgagacactggtggccgtggccctgggcatcagcatggcccggagtgccatgcccctgcgggacgcggccaagctggcggtcaccgtaagcgccatgatccccctgggcatcggcctgggcctgggcattgagagcgcccagggcgtgccgggcagcgtggcgtccgtgctgctgcagggcctggcgggcggcaccttcctcttcatcaccttcctggagatcctggccaaggagctggaggagaagagtgaccgtctgctcaaggtcctcttcctggtgctgggctacaccgtcctggccgggatggtcttcctcaagtggtgagcggcctcgccattgtccctgccgccggagcccgccgggagccccgggccggacacaggccgcgtcccccggccgcgcgtcccccaagagcgagcactgtggccctgggccaccacctgtgcacaaggggcctcccgggaccaggctgtgcccccgatcctacaccctgagcctcagagcactgctactttttaaaatacttctttctcttaaaaaaaaaaaaaaaaaaaaaaaaaaaa

SEQ ID NO: 1596 - DNA, 1233 bp, Homo sapiens; identical to SEQ ID NO: 265

SEQ ID NO: 1597 - DNA, 447 bp, Homo sapiens
gctgaggacatctctgtgccaggccagaaaccgcccacctgcaggtgaggcccggaccccttcccagttccttctccgggatggacgtggggcccagctccctgccccaccttgggctgaagctgctgctgctcctgctgctgctgcccctcaggggccaagccaacacaggctgctacgggatccctggagagccaggtgaggagggcagatacaagcagaaattccagtcagtgttcacggtcactcggcagacccaccagccccctgcacccaacagcctgatcagattcaacgcggtcctcaccaacccgcagggagattatgacacgagcactggcaagttcacctgcaaagtccccggcctctactactttgtctaccacgcgtcgcatacagccaacctgtgcgtgctgctgtaccgcagcggcgtcaaagtggtcacct

SEQ ID NO: 1598 - DNA, 996 bp, Homo sapiens
ccacgcgtccgctgaggacatctctgtgccaggccagaaaccgcccacctgcaggtgaggcccggaccccttcccagttccttctccgggatggacgtggggcccagctccctgccccaccttgggctgaagctgctgctgctcctgctgctgctgcccctcaggggccaagccaacacaggctgctacgggatccctggagagccaggtgaggagggcagatacaagcagaaattccagtcagtgttcacggtcactcggcagacccaccagccccctgcacccaacagcctgatcagattcaacgcggtcctcaccaacccgcaggagattatgacacgagcactggcaagttcacctgcaaagtccccggcctctactactttgtctaccacgcgtcgcatacagccaacctgtgcgtgctgctgtaccgcagcggcgtcaaagtggtcaccttctgtggccacacgtccaaaaccaatcaggtcaactcgggcggtgtgctgctgaggttgcaggtgggcgaggaggtgtggctggctgtcaatgactactacgacatggtgggcatccagggctctgacagcgtcttctccggcttcctgctcttccccgactagggcgggcagatgcgctcgagacccacgggccttccacctccctcagcttcctgcatggacccaccttactggccagtctgcatccttgcctagaccattctcccctccagggagcccaccctgacccacccccactgcaccccctccccatgggttctctccttcctctgaacttctttaggagtcactgcttgtgtggttcctgggacacttaaccaatgccttctggtactgccattcttttttttttttttcaagtattggaaggggtggggagatatataaataaatcatgaaatcaaaaaaaaaaaaaaaaaaaaaaaaaaaaaaaaaaaaaaaaaaaaaaaaaaaaaaaaaaaaaaaaaaaaaaaaaaaa

SEQ ID NO: 1599 - DNA, 1698 bp, Homo sapiens
tccaggccctggtgaagtacggaatgccggaagggccgggctcaaagctccgcctctggcgcgaccgacgactggagcgcagggcaggggtagaggctcgtagatggaactggtagtcagctggagagcagcatggaggcgtcctgggggagcttcaacgctgagcggggctggtatgtctctgtccagcagcctgaagaagcggaggccgaagagttgagtccgttgctaagcaacgaacttcacagacagcgatccccaggtgtttcatttggtttatcagtgtttaatttgatgaatgccatcatgggaagtggcatccttggcttagcttatgttatggctaataccggtgtctttggatttagcttcttgctgctgacagttgctctcctggcttcttactcagtccatcttctgcttagtatgtgtattcagacagctgtaacatcttatgaagatcttggactctttgcatttggattacctggaaagttggtggtggcaggcaccataataattcagaatattggagctatgtcatcttatcttttaattattaaaacagagcttcctgctgctattgcagaatttttgactggagactatagtagatattggtatcttgatggacaaacactactaataatcatatgtgttggcattgtgttccctcttgcacttcttcccaaaataggctttcttggctacacaagtagtttatcatttttctttatgatgttctttgctcttgtggtaataattaaaaaatggtccatcccttgtcctctgacattaaattatgtagagaaaggcttccagagtgcttatgccttaccaaccatggctttttcatttctctgccatacctcaatattgcccatatactgtgaacttcaaagtccttcaaagaaaagaatgcagaatgttaccaatacagcaattgctttaagttttctcatttattttatatctgcactctttgggtacctcactttttatgacaaagtggagtcagaattactaaaaggttatagtaaatacttatcacatgatgttgktgtcatgactgtgaagttatgcatactatttgctgtgcttttgacagtccctctaatccacttccctgccagaaaagctgtaacaatgatgtttttctccaattttccattctcatggattcgccattttttgatcactctagcactcaatattatcatcgttttacttgcaatatatgttcctgacattagaaatgtatttggtgtagttggtgccagtacatcaacatgtttgatttttatattcccaggactattttatyttaaacttagcagagaggattttctgtcatggaaaaagcttggggttggcgtgcagtggtgtgatctcagctcattgcaacctctgcctcccggactcaagcaatcctcccacctcagcctccagagtagctgagactacaggaagagataccatggagatgtgcacccagaggaaaggccacgcaaggacacagcaagaaggcaactgtttacaagccaagggaagaggcctcaggagaaccaaacgtgtccacaccttgatcttgcacttcccaacctccagaactgtgagcaaataaatgatgttgtttaatcaaaaaaaaaaaaaaaaaaaaaaaaaaaaaaaaaaaaaaaaaaaaaaaaaaaaaaaaaa

SEQ ID NO: 1600 - DNA, 1870 bp, Homo sapiens
cacgcgtccggcaacactccgaggccaggaacgctccgtctggaacggcgcaggcagatgccagccccaaacctcatccctagtggaggccttgctgatgtggaagtggccagggccctcatggaggctgggcagaagcccaagagcaggctctaaagctgccaaacccggcagccctggtccccggaggctcttgccagtctgacagtgttcttggcactgctcagaggtcccagcagctggggttccccctcagcccgtgagcagccatgtccaaccccagcgccccaccaccatatgaagaccgcaaccccctgtacccaggccctcygccccctgggggctatgggcagccatctgtcctgccaggagggtatcctgcctaccctggctacccgcagcctggctacggtcaccctgctggctacccacagcccatgccccccacccacccgatgcccatgaactacggcccaggccatggctatgatggggaggagagagcggtgagtgatagcttcgggcctggagagtgggatgaccggaaagtgcgacacacttttatccgaaaggtttactccatcatctccgtgcagctgctcatcactgtggccatcattgctatcttcacctttgtggaacctgtcagcgcctttgtgaggagaaatgtggctgtctactacgtgtcctatgctgtcttcgttgtcacctacctgatccttgcctgctgccagggacccagacgccgtttcccatggaacatcattctgctgaccctttttacttttgccatgggcttcatgacgggcaccatttccagtatgtaccaaaccaaagccgtcatcattgcaatgatcatcactgcggtggtatccatttcagtcaccatcttctgctttcagaccaaggtggacttcacctcgtgcacaggcctcttctgtgtcctgggaattgtgctcctggtgactgggattgtcactagcattgtgctctacttccaatacgtttactggctccacatgctctatgctgctctgggggccatttgtttcaccctgttcctggcttacgacacacagctggtcctggggaaccggaagcacaccatcagccccgaggactacatcactggcgccctgcagatttacacagacatcatctacatcttcacctttgtgctgcagctgatgggggatcgcaattaaggagcaagcccccattttcacccgatcctgggctctcccttccaagctagagggctgggccctatgactgtggtctgggctttaggcccctttccttccccttgagtaacatgcccagtttcctttctgtcctggagacaggtggcctctctggctatggatgtgtgggtacttggtggggacggaggagctagggactaactgttgctcttggtgggcttggcagggactaggctgaagatgtgtcttctccccgccacctactgtatgacaccacattcttcctaacagctggggttgtgaggaatatgaaaagagcctattcgatagctagaagggaatatgaaaggtagaagtgacttcaaggtcacgaggttcccctcccacctctgtcacaggcttcttgactacgtagttggagctatttcttcccccagcaaagccagagagctttgtccccggcctcctggacacataggccattatcctgtattcctttggcttggcatcttttagctcaggaaggtagaagagatctgtgcccatgggtctccttgcttcaatcccttcttgtttcagtgacatatgtattgtttatctgggttagggatgggggacagataatagaacgagcaaagtaacctatacaggccagcatggaacag

SEQ ID NO: 1601 - DNA, 1029 bp, Homo sapiens
catgcaggggtggagaagagggcgagagggagagaggataaatagcagcgtggcttccctggctcctctctgcatccttcccgaccttcccagcaatatgcatcttgcacgtctggtcggctcctgctccctccttctgctactgggggccctgtctggatgggcggccagcgatgaccccattgagaaggtcattgaagggatcaaccgagggctgagcaatgcagagagagaggtgggcaaggccctggatggcatcaacagtggaatcacgcatgccggaagggaagtggagaaggttttcaacggacttagcaacatggggagccacaccggcaaggagttggacaaaggcgtccaggggctcaaccacggcatggacaaggttgcccatgagatcaaccatggtattggacaagcaggaaaggaagcagagaagcttggccatggggtcaacaacgctgctggacaggccgggaaggaagcagacaaagcggtccaagggttccacactggggtccaccaggctgggaaggaagcagagaaacttggccaaggggtcaaccatgctgctgaccaggctggaaaggaagtggagaagcttggccaaggtgcccaccatgctgctggccaggccgggaaggagctgcagaatgctcataatggggtcaaccaagccagcaaggaggccaaccagctgctgaatggcaaccatcaaagcggatcttccagccatcaaggaggggccacaaccacgccgttagcctctggggcctcggtcaacacgcctttcatcaaccttcccgccctgtggaggagcgtcgccaacatcatgccctaaactggcatccggccttgctgggagaataatgtcgccgttgtcacatcagctgacatgacctggaggggttgggggtgggggacaggtttctgaaatccctgaagggggttgtactgggatttgtgaataaacttgatacactaaaaaaaaaaaaaaaaaaaaaaaaaaaaaaaaaaagaggagggggg

SEQ ID NO: 1602 - DNA, 1483 bp, Homo sapiens
  misc_feature (1444)..(1444): n equals a,t,g, or c
  misc_feature (1456)..(1456): n equals a,t,g, or c
  misc_feature (1469)..(1469): n equals a,t,g, or c
  misc_feature (1479)..(1479): n equals a,t,g, or c
  misc_feature (1483)..(1483): n equals a,t,g, or c
gccggaagcgagcaaagtggagccgactcgaactccaccgcggaaaagaaagcctcagaacgttcgctcgctgcgtccccagccggggccgagccctccgcgacgccacccgggccatgggggccgcacgcagcccgccgtccgctgtcccggggcccctgctggggctgctcctgctgctcctgggcgtgctggccccgggtggcgcctccctgcgactcctggaccaccgggcgctggtctgctcccagccggggctaaactgcacggtcaagaatagtacctgcctggatgacagctggattcaccctcgaaacctgaccccctcctccccaaaggacctgcagatccagctgcactttgcccacacccaacaaggagacctgttccccgtggctcacatcgaatggacactgcagacagacgccagcatcctgtacctcgagggtgcagagttatctgtcctgcagctgaacaccaatgaacgtttgtgcgtcaggtttgagtttctgtccaaactgaggcatcaccacaggcggtggcgttttaccttcagccactttgtggttgaccctgaccaggaatatgaggtgaccgttcaccacctgcccaagcccatccctgatggggacccaaaccaccagtccaagaatttccttgtgcctgactgtgagcacgccaggatgaaggtaaccacgccatgcatgagctcaggcagcctgtgggaccccaacatcaccgtggagaccctggaggcccaccagctgcgtgtgagcttcaccctgtggaacgaatctacccattaccagatcctgctgaccagttttccgcacatggagaaccacagttgctttgagcacatgcaccacatacctgcgcccagaccagaagagttccaccagcgatccaacgtcacactcactctacgcaaccttaaagggtgctgtcgccaccaagtgcagatccagcccttcttcagcagctgcctcaatgactgcctcagacactccgcgactgtttcctgcccagaaatgccagacactccagaaccaattccggactacatgcccctgtgggtgtactggttcatcacgggcatctccatcctgctggtgggctccgtcatcctgctcatcgtctgcatgacctggargctagctgggcctggaagtgaaaaatacagtgatgacaccaaatacaccgatggcctgcctgyggctgacctgatccccccaccgctgaagcccaggaaagtctggatcatctactcagccgaccaccccctctacgtggacgtggtcctgaaattcgcccagttcctgctcaccgcctgcggcacggaagtggccctggacctgctggaagagcargccatctcggaggcaggagtcatgacctgggtgggccgtcagaagcaggagatggtggagagcaamtctaaganaagcgttttccnttaaagtcccccnttaagtatcncgtn

SEQ ID NO: 1603 - DNA, 968 bp, Homo sapiens
  misc_feature (25)..(25): n equals a,t,g, or c
  misc_feature (32)..(32): n equals a,t,g, or c
  misc_feature (35)..(35): n equals a,t,g, or c
  misc_feature (47)..(47): n equals a,t,g, or c
  misc_feature (50)..(50): n equals a,t,g, or c
  misc_feature (838)..(838): n equals a,t,g, or c
  misc_feature (919)..(919): n equals a,t,g, or c
  misc_feature (955)..(955): n equals a,t,g, or c
tacgggatctttaacgggaaactcnactgtanccntccggtgtttgnctnttcagattataaaagtaatatgtgttcccatatttggcgtctctcaggagctcaggaagtacttggctgagtgaacatgtccattgtggaaaaatggcaacaatatggattccatgggtatattttatagaagaatatgaagaaaagcagctacccctaaacccatggcacaagctgttcatgttaattctgtacccgacgctttccccacggggcctcccctcactctgaaatggcatccaggtccatcttgccctccacctctgcatggctctccatgccccatcgcctctcccagatcctagcactgggtccacactctcgccctgtccwtttwggttgatgaaagcaggcagtcacccgggtgggccagtcttgcctgtgggaggaacatgcagtctcctgtctcatggtttgaagtgtgccaggaagcctggcccagcccacctccccctggagtccttcccaggaggaataaccccttaggtcattgactataagatgagttcgctcactggatccttcctctctgatgagacaggaagaaggtacacagtgaccaggtaggaggaggagagggagtagaaaggagggatgcgggtggctggtccctgcatttgcctgcttccctgcacgggtgtcccactggccgcctctgctcaccagtgtcatgggattctctcagaagatgaaaacagcccctgctttttttgctagaatggctgaactttcatggaaaggaagctggacccaagcaacagccgactaccgaaggttgcctggagcantgcagatgtgggaggaagaaaggccttggtgcacactggcttttcttcctgactgcaatgtggcattgtgccagctacctnctctttctcgggctcaggaaaatggagagaaaacancccttaagtggct

SEQ ID NO: 1604 - DNA, 939 bp, Homo sapiens
  misc_feature (884)..(884): n equals a,t,g, or c
acggggggggcaaaggaagggaaactcttcggagccactgttgcctccgggaaccggcatcgtgaagcgggcgcccctggtgcgcgagcctggctcccaggcctgcctggcctttcctgtttatctttgaaaattaaatagggcataagagagaagaagatgtacttacaatgcagtgggtggttttaactctatagcctttgggctctgtggttggtgctccccttcctaaataaatgaggtgtatgcagggccctcttctgccttagcgccctgccagctgggactccagcaaggcccggggcacctgaggacagagtgagatggagggccgctgctccagcagctgggcctgcatcccacaagtcaactgtgtcggacagaggatccttacaaagaagaggcagcagggttgggggctggccagctgctcgtccgcctaggtagcttgctcatctgtaaagtgggtggggcaggaattcccacctcatggggtcctggcaagcctgcagtatccccgagtggcaccarcctgcttctggggcagagcartttgtgccccctgaggtaccactgatcctctttccctgctattargtattgctctctccctccggtgtttgccttttcagattataaaagtaatatgtgttcccatatttggcgtctctcaggagctcaggaagtacttggctgagtgaacatgtccattgtggaaaaatggcaacaatatggattccatgggtatattttatagaagaatatgaagaaaagcagctacccctaaacccatggcacaagctgttcatgttaattctgtacccgacgctttcccacggggcctcccctcactctgaaatggcatccaggtccatcttgccctncacctctgcatggctcttcatgccccatcgcctcttccagatcctagcactgggt

SEQ ID NO: 1605 - DNA, 2138 bp, Homo sapiens
  misc_feature (10)..(10): n equals a,t,g, or c
  misc_feature (209)..(209): n equals a,t,g, or c
ggctaactgnaaacctctgcctcccagattcaagcaattctcctgcctcagcctccccaagtagctaggactacaggcatgtgtcaccatgcccggctaatttttctatttttagtggaagatggggtttcaccatgttggccaggctggctcaaactcctgacctcagagtgatccacctgcctcggcctcccaatgtgctgggattnacaggcgtgagccaccgtgcccggcccatcctgttcgtttaatgtgtcctcggcactagcggttaagttccttyatggctggggccatgccgcatgcaatttatcttggtatcccaaatgcccgccacatagtaggtgcacaataaatgctgaatgaacgaataatggagcctcaaggacgctctaccattagctcctgggagcgggctgtgtggattcccctggggatagacgataaccagaccgctgcacaaagaaaagttaggagggatgcctgggattaaaatccagacatttacattttaaagcctacatttcacacacgaacatatacacatgcagacatgtacacacagatgaatacgtgcacacacactcctctctcaaagctgggatctgggcggtccctggggagccgccctcatgcactgggcccctctgactctgaccccatcgtgtcccagcccgagttcttctgcagctggcggaaaagcagctgccgctggaggctcctcaggctctccaggtcctcgggagagagtggcagggccggcttccctgggtcctgctcctcttcctcctcttcctccatttccgtgagtccctcggggggctgcggggagctcctggagatgtagccctggtcagactgcactgactgccgctgctcctcctcgtagggcgtgtgtgggtctgtgaggaccatggcgggtctactgcagcccccctgggcctggcagctcagactctgctcgaagagcgagagcatcaagccttcgaggtgctccctcacgtcctctggaaggaggtcaggagacgccatgggggtgctgctgccaaggggcgagtcctcggggtccacggggaggaagaggacgctatttcgcccagcgcccgggctgcccagcagcgggcaggcctcgccctcccccgccagtgccagccggactgcggcaccgtcagccaggggcccaggctccaccgcggccaccagggccccctcctctgcggcgagcaccagggtgtggaggggctgcggcgctggctgaccccggggctgcaggtgaggttccagctttgccactgctgctcctccttcctcmccgaccarcgggtctatggccaggcaggcctgggagccaggctcgcgcaccaggggcgcccgcttcacgatgccggttcccggaggcagcagtggctcctcaaacacctcttcgtccagggacggggcatcctggtcatctgctgagtagaggttctcacattcgaaccagtcgggacagcggacctgccagtcccggaacctgtccagggcggcgcggagctgcctgccgcccgggctccgcaggtagttgtcccccgacagctcccctacgcggtgcatgcggcccggctggaacatctccaggtcctggatgcggaagtacacctcctcgaacctgtccatgagcgggtaccgcggcgccgcgccgaacaggtcggggacgtcgccgtcacagctgacctcgctgaagtagcagactacgtaggtgccgaagcaggctggcctcttgaagtccgggaggatcatgttcatggctgcagtgaacaggtcccccacgggctttccgtggtcgcagcgcagccgcacaggcgccccccggcccaggagcgcctgccacttggcgcgcgtgccgcgggagcacaggacgatgatcttagagttgctctccaccatctcctgcttctgacggcccacccaggtcatractcctgcctccgagatggcctgctcttccagcaggtccagggccacttccgtgccgcaggcggtgagcaggaactgggcgaatttcaggaccacgtccacgtagagggggtggtcggctgagtagatgatccagactttctgggcttcarcggtggggggatcaggtcagccgcaggcag

SEQ ID NO: 1606 - DNA, 633 bp, Homo sapiens
  misc_feature (52)..(52): n equals a,t,g, or c
  misc_feature (569)..(569): n equals a,t,g, or c
  misc_feature (627)..(628): n equals a,t,g, or c
  misc_feature (630)..(630): n equals a,t,g, or c
ttacatagaaaataattacagaccaacgtaggaccatgtcttcatttctccntggagcggatgtaaaataaggtgattgatttgagcaagcatgttatgaatatttagaaatgtcttctagggaagcaagctggcgctcaccgattttggtttgccaggcatatcagaaggcactttgtgacaggtgcagtagggacgcggagtgatctcttcacgtgtaggcaatgcccagcccacacctaggccttgcctgagtctggccatgcagttcttgccctaaggaagaacaggaaaatatagcgcgtggttgactgtcaggccctctgccccttccctcgtcacagccaccttcagggctgctttctctccattttcctgaggccgagaaagaggaggtagctggcacaatgccacattgcagtcaggaagaaaagccagtgtgcaccaaggcccttcttcctcccacatctgcactgctccaggcaaccttcggtagtcggctgttgcttgggtccagcttcctttccatgaaagctcagccattctagcaaaaaaagcaggggctgttntcatcttctgagaaaatcccatgagctkttcccyttaagtcccccttaagtatccctnnangga

SEQ ID NO: 1607 - DNA, 1233 bp, Homo sapiens; identical to SEQ ID NO: 265

SEQ ID NO: 1608 - DNA, 436 bp, Homo sapiens
  misc_feature (372)..(372): n equals a,t,g, or c
  misc_feature (387)..(387): n equals a,t,g, or c
  misc_feature (392)..(392): n equals a,t,g, or c
ccggaattcccggtcgacccacgcgtccggaagcagatctgaggacatctctgtgccaggccagaaaccgcccacctgcaggtgaggcccggacccctgcccagttccttctccgggatggacgtggggcccagctccctgccccaccttgggctgaagctgctgctgctcctgctgctgctgcccctcaggggccaagccaacacaggctgctacgggatcccagggatgcccggctgcccggggcaccagggaaggatgggtacgacggactgycggggcccaagggggagccaggaatcccagycattcccgggatccgaggacccaaaggcagaagggagaaccggttacccggcatcctgggaaatngcccatgggaccctngatgnaaaggtgccggcccatggatccttgagaccagtgagaggcatta

SEQ ID NO: 1609 - DNA, 1209 bp, Homo sapiens; identical to SEQ ID NO: 1075

SEQ ID NO: 1610 - DNA, 1114 bp, Homo sapiens
ccgaattcccgggtcgaccacgcgtccgcacagcaataaaatgaccactctgagatggccaccagctcgagcccgagggcacttgtgggtgcccgtggtctcctgcccagtctccctgagaagtggccactgtcccgagcttgggcttgtatgtattgtgtgaagtgcacatgtccctgagcaatgtttagcattgctgattcttgagcttgtgaatggtcgtccacagtacgtagcccctgtgtgtgtccctgtgtgtgtgtgctctgagcgcacacaaggtggatggggccgtgggggtaacaccctgtgggccacaggttttctttaaaatcccagctccgattcctgcttcatcccattcccagcagcccagccccctgcctgtcttcaggcccctgctgggacgtcctgctctccctggtcaccccagtggtgcgggggcccactgccctggcttctccactgtggcttccttccatgctcctatttggcctggtcactgtgccatctcccattagccaggaactttctggagagcaggagctgagctgtccaggagcaggagctggtgctggtcactccagtatcccccagactgagggcagtgccaggtgtcctatactcagctgcagagcaggtggttcccctgccctcctgcccatggggctgccctcagactctgcttttggcaccagcatttctgggcagggggagagaggtggggtccgggcagagtttctccactgggacattaaagcccctcctgtctcctctcctagttgaaaacaccacacactgtgagtttgcctacctgcgggaccttctcatcaggacgcacatgcagaacatcaaggacatcaccagcagcatccacttcgaggcgtaccgtgtgaagcgcctcaacgagggcagcagcatcccagccttgagatgcttcactttccttctctgtaaccagactttgaaaaattgttcgtttcatcaggctctgttcctcaatggccttttgctacgtgcctcccgagaaatttgtctttttgtataaatgacaaagtgttgaaaatgtatttcctgaaataaatgtttcaaatgcagaaacccaaaaaaaaaa

SEQ ID NO: 1611 - DNA, 1233 bp, Homo sapiens; identical to SEQ ID NO: 265

SEQ ID NO: 1612 - DNA, 618 bp, Homo sapiens
  misc_feature (507)..(507): n equals a,t,g, or c
  misc_feature (521)..(521): n equals a,t,g, or c
  misc_feature (574)..(574): n equals a,t,g, or c
  misc_feature (578)..(578): n equals a,t,g, or c
  misc_feature (595)..(595): n equals a,t,g, or c
  misc_feature (610)..(610): n equals a,t,g, or c
ggggagcagatctgaggacatctctgtgccaggccagaaaccgcccacctgcagttccttctccgggatggacgtggggcccagctccctgccccaccttgggctgaagctgctgctgctcctgctgctgctgcccctcaggggccaagccaacacaggctgctacgggatcccagggatgcccggcctgccyggggcaccagggaaggatgggtacgacggactgccggggcccaagggggagccaggaatccagccattccgggatccgaggacccaaarggcagaagggagaacccggttacccggcatctgggaaaawtgcccatgggaccccctgggatgccargggtgccggcccatgggcatccytggagascaggtgagragggcagatacaagcagaaattccagtcaktgtcacggcactcggagaccacagcccctgacccaacagctgatagatcaacgcggtctaacaaccgaaggagatatacacgacactgnaagtcactgaaagnccggcttacacttgctacacgcgtgataagcaactggctgtgtgacgaacggntaangggcactttgggcaacncaaacataggcaatngcggggct

SEQ ID NO: 1613 - DNA, 872 bp, Homo sapiens
  misc_feature (854)..(854): n equals a,t,g, or c
  misc_feature (863)..(863): n equals a,t,g, or c
tttttttttttttttttttttttttttttttttkwtttcatgatttatttatatatctccccmccccttccaatacttgaaaaaaaaaaaaaaagaatgscagtmccagaagscattggttaagtgtcccaggaaccacacaagcagtgactcctwaagaagttcagagraaggagagaacccatggggagggggtgcagtggggtgggtcagggtgggctccctggaggggagaatggtctaggcaaggatgcagactggccagtaaggtgggtccatgcaggaagctgagggaggtggaaggcccgtgggtctcgagcgcatctgccgccctagtcggggaagagcaggaagccggagaagacgctgtcagagccctggatgcccaccatgtcgtagtagtcattgacagccagccacacctcctcgcccacctgcaacctcagcagcacaccgcccgagttgacctgattggttttggacgtgtggccacagaaggtgaccactttgacgccgctgcggtacagcagcacgcacaggttggctgtatgcgacgcgtggtagacaaagtagtagaggccggggactttgcaggtgaacttgccagtgctcgtgtcataatctccctgcgggttggtgaggaccgcgttgaatctgatcaggctgttgggtgcagggggctggtgggtctgccgagtgaccgtgaacactgactggaatttctgcttgtatctgccctcctcacctggctctcccatggggccatttttcccaggatggccgggtaagccgggttctcccttctgccctttgggtcctcggatcccgggaatggctgggattcctggctaccngttgtccanaggcataaa

SEQ ID NO: 1614 - DNA, 1209 bp, Homo sapiens; identical to SEQ ID NO: 1075

SEQ ID NO: 1615 - DNA, 76 bp, Homo sapiens
gaaatcaaaaaaaaaaaaaaaagggcggccgcacaagaggamcccacgaggggccaaagaaacgcgagcatgcgac

SEQ ID NO: 1616 - DNA, 3178 bp, Homo sapiens
  misc_feature (3163)..(3163): n equals a,t,g, or c
  misc_feature (3167)..(3167): n equals a,t,g, or c
ggcttgctgtgttttgatgttggtggctaagctcatccagtgtattgtgtttggccctcttcgagtgagtgagagacagcatctcaaagacaaattttggaattttattttctacaagttcattttcatctttggtgtgctgaatgtccagacagtggaagaggtggtcatgtggtgcctctggtttgccggacttgtctttctgcacctgatggttcagctctgcaaggatcgatttgaatatctttccttctcgcccaccacgccgatgagcagccacggtcgagtcctgtccctgttggttgccatgctgctttcctgctgtggactggcggccgtctgctccatcaccggctacacccacggaatgcacaccttggctttcatggctgcagagtctcttcttgtgacagtgaggactgctcatgtgattttacgatacgtaattcacctctgggacctcaaccacgaagggacgtgggaaggaaaggggacgtatgtctattacacagactttgtcatggagctcactctcctgtccctggacctcatgcaccatattcacatgttgttatttggcaacatctggttatccatggccagcctggtcatctttatgcagctgcgttacctgtttcatgaggtgcaacgtcgaattcgtcggcacaagaactatctacgtgtggttggaaacatggaggccaggtttgcagttgcaactccagaggagctggctgtcaacaatgacgactgtgccatctgttgggactccatgcaggctgcgcggaaactgccctgtggacatcttttccacaactcctgtcttcgttcctggctagaacaagacacctcctgtccaacatgcagaatgtctcttaatattgccgacaataatcgtgtcagggaagaacatcaaggagagaacttggatgagaatttggttcctgtagcagcagccgaagggagacctcgcttaaaccaacacaatcacttcttccatttcgatgggtctcggattgcgagctggctgccgagtttttcggttgaagtgatgcacaccaccaacattcttggcattacgcaggccagcaactcccagctcaatgcaatggctcatcagattcaagagatgtttccccaggttccataccatctggtactgcaggacctccagctgacacgctcagttgaaataacaacagacaatattttagaaggacggattcaagtaccttttcctacacagcggtcagatagcatcagacctgcattgaacagtcctgtggaaaggccaagcagtgaccaggaagagggagaaacttctgctcagaccgagcgtgtgccactggacctcagtcctcgcctggaggagacgctggacttcggcgaggtggaagtggagcccagtgaggtggaagacttcgaggctcgtgggagccgcttctccaagtctgctgatgagagacagcgcatgctggtgcagcgtaaggacgaactcctccagcaagctcgcaaacgtttcttgaacaaaagttctgaagatgatgcggcctcagagagcttcctcccctcggaaggtgcgtcctctgaccccgtgaccctgcgtcgaaggatgctggctgccgccgcggaacggaggcttcagaagcagcagacctcctagcgctcccttgccttcctcagctgcctcctgcgccctgtgcccgactgactggaggaggcctgtcccaattctgcccgctccatggaaaagcgggcttgactgcattgccgctgtataaagcatgtggtcttatagtgtttggacagctgataaatttaatccttctttgtaatactttctatgtgacatttctcttccccttagaaacactgcaaattttaactgtaggtatgatctcttctggtgttgactggactgcttggggtgggggacgatcaggaggaagtgagcagtcgcctgcctgcagcaggcagcttctactcctgcctcatgcatacgtcccacaaatgcaggtgtcctgagcaccacacccagtgggaagagtgtgggggaggcgcacagtgtgagcccgcccccacgtcgtggggtaacatctgttatcaaactgctgtcgttgttgtggaagcatgtagactgtgccagaggccagacccacgggctcatgcacccctgagccagcagggcatcttggaaaaggaactcttggttcgatacctggagcagaggaggggaaagtccagggctatagggtgtgatgaagtcacccctttctgtcccactacatctgggactgactttccgagcctccagtccaaagccggcttgatttccgtgaactctggtgctcctgcatctcatgagtgtgccccatgggtcccctcccctctcagcatttccttgtcccgtctggacctggggagtggttaggcagcaagctttggtttatggttttcattcattggtgaagtaaattaggcagtgctaaagcctgtgggtttggtccttgaacaagatgtgggccttgcaagatgggagagtaaaccttgaagggctttattaaagaaataaaaaagaacttttgtatcttttatcctgggagcactgcgttttcctagctgtgttattcctggtttaattcagcagagaaggtaaggtgtgaacctacctgccttggagagggcccaggtcccaaatctcttcaaattcttcacatgtttaactttaaggatttgaaccatgaagtcataggttacagacctcagttttatgccccattggattactttttttttttttttttttttactctttgaaagctttgttttgtggtagtccttttgggaagaatccagtattatctacaattattggcaaagtttaaatgtattttacataacggaaagtttttagaatgttgaaaagtaattgaaaaaggtgataggtaaatttttaggcaaagataatttatttcaataaatctttcaaaagccttaccttgaaatgctgttagtaaatttctgtgattttttttttttaatttgttttgctgagagcatagctatttgtttttattgtaaaacaataataataataaaaagcaaactctaaaaaaaaaaaaaaaaaaaaaaaaaaaaaaaaaaaaaaaaaaaaaaaaaaaancccnggggggggccc

SEQ ID NO: 1617 - DNA, 641 bp, Homo sapiens
  misc_feature (4)..(5): n equals a,t,g, or c
  misc_feature (22)..(22): n equals a,t,g, or c
  misc_feature (41)..(41): n equals a,t,g, or c
  misc_feature (117)..(117): n equals a,t,g, or c
tggnnaagctcggattttagtnttttgtcctacacaccggncagatagcatcagacctgcattgaacagtcctgtggaaaggccaagcagtgaccaggaagagggagaaacttctgntcagaccgagcgtgtgccactggacctcagtcctcgcctggaggagacgctggacttcggcgaggtggaagtggagcccagtgaggtggaagacttcgaggctmgtkggagccgcttctccaagtctgctgatgagagacagcgcatgctggtgcagcgtaaggacgaactcctccagcaagctcgcaaacgtttcttgaacaaaagttctgaagatgatgsggcctcagagagcttcctcccctcggaaggtgcgtcctctgaccccgtgaccctgcgtcgaaggatgctggctgccgccgcggaacggaggcttcagaagcagcagacctcctagcgctcccttgccttcctcagctgcctcctgcgccctgtgcccgactgactggaggaggcctgtcccaattctgcccgctccatggaaaagcgggcttgactgcattgccgctgtataaagcatgtggtcttatagtgtttggacagctgataaatttaatccttctttgtaaaaaaaaaaaaaaaaa

SEQ ID NO: 1618 - DNA, 1708 bp, Homo sapiens
  misc_feature (1696)..(1696): n equals a,t,g, or c
gcccacgcgtccgctcacttctgcctgatttgggaagcgctgcaaggacaaccggctggggtccttgcgcgccgcggctcagggaggagcaccgactgcgccgcaccctgagagatggttggtgccatgtggaaggtgattgtttcgctggtcctgttgatgcctggcccctgtgatgggctgtttcrctccctatacagaagtgtttccatgccacctaagggagactcaggacagccattatttctcaccccttacattgaagctgggaagatccaaaaaggaagagaattgagtttggtcggycctttcccaggactgaacatgaagagttatgccggcttcctcaccgtgaataagacttacaacagcaacctcttcttctggttcttcccagctcagatacagccagaagatgccccagtagttctctggctacagggtgggccgggaggttcatccatgtttggactctttgtggaacatgggccttatgttgtcacaagtaacatgaccttgcgtgacagagacttcccctggaccacaacgctctccatgctttacattgacaatccagtgggcacaggcttcagttttactgatgatacccacggatatgcagtcaatgaggacgatgtagcacgggatttatacagtgcactaattcagtttttccagatatttcctgaatataaaaataatgacttttatgtcactggggagtcttatgcagggaaatatgtgccagccattgcacacctcatccattccctcaaccctgtgagagaggtgaagatcaacctgaacggaattgctattggagatggatattctgatcccgaatcaattatagggggctatgcagaattcctgtaccaaattggcttgttggatgagaagcaaaaaaagtacttccagaagcagtgccatgaatgcatagaacacatcaggaagcagaactggtttgaggcctttgaaatactggataaactactagatggcgacttaacaagtgatccttcttacttccagaatgttacaggatgtagtaattactataactttttgcggtgcacggaacctgaggatcagctttactatgtgaaatttttgtcactcccagaggtgagacaagccatccacgtggggaatcagacttttaatgatggaactatagttgaaaagtacttgcgagaagatacagtacagtcagttaagccatggttaactgaaatcatgaataattataaggttctgatctacaatggccaactggacatcatcgtggcagctgccctgacagagcgctccttgatgggcatggactggaaaggatcccaggaatacaagaaggcagaaaaaaaagtttggaagatctttaaatctgacagtgaagtggctggttacatccggcaagygggtgacttccatcaggtaattattcgaggtggaggacatattttaccctatgaccagcctctgagagcttttgacatgattaatcgattcatttatggaaaaggatgggatccttatgttggataaactaccttcccaaaagagaacatcagaggttttcattgctgaaaagaaaatcgtaaaaacagaaaatgtcataggaataaaaaaattatcttttcatatctgcaagatttttttcatcaataaaaattatccttgaaacagggggtttttntttttggggggg

SEQ ID NO: 1619 - DNA, 2030 bp, Homo sapiens
  misc_feature (1781)..(1781): n equals a,t,g, or c
  misc_feature (1851)..(1851): n equals a,t,g, or c
  misc_feature (2009)..(2009): n equals a,t,g, or c
aattaaccctcactaaagggaacaaaagctggagctccaccgcggtggcggccgctctagaactagtggatcccccgggctgcaggaattcggcacgagtgatactcctgttgcaggaccatttgaagtctgagagtttccaggtgtctggaaatgaagaagatgttcaagctgaaagagtccaagcagcaaatgcactcactactccaaacttggaggaggaaccagtcataactgcaagctgtttacacaaggaatattatgagacaaagaaagttgcttttcaacaacaaagaagaaagcagccatcagaaatgtttcgttttgtgttaaaaagtgaagttttgggattactaggacacaatggagctggcaaaagtacttccattaaaatgataactgggtgcacagtgccaactgcaggagtggtggtgttacaaggcaacagagcatcagtaaggcaacagcgtgacaacagcctcaagttcttgggtactgccctcaggagaactcactgtgtcccaaacttacaatgaaagagcatttggagttgtatgcagccgtgaaaggactgggcaaagatgctgctcttagtatttcatgattggtggaagctctcaagctccaggagcaacttaaggctcccgtgaaaactctatcagagggaataaagagaaagctatgcttcgtgctgagcatactggggaacccatcagtggtgcttctagacgagctgttcaccgggatggaccctgaggggcagcagcaaatgtggcagatacttcaggctaccattaaaaaccaggagaggggcgccctcttgaccacccattacatgtcagaggctaagtctctgtgtgaccgtgtggccatcatggtgtcaggaacgctaaggtgtattggttccattcaacagctgaaaagtttggtaaagattatttactagaaataaaaatgaaagaacctactcaggtggaagctctccacacagagattttgaagcttttcccacaggctgcttggcaggaaagatattcctctttaatggcatgtaagttacctgtggaggatgtccaccctctgtctcaggcctttttcaaattaaaggcagtgaaacagaccttcaacctggaggaatacagcctctctcaggctaccttggagcaggtgttcttagaactctgtaaagagcaggcgctgggaaatgttgatgataaaattgatataacagttcgatggaaacttctcccacgggaagattcttaaaacgaagaacctcctaacattcaattttaagtcctactgcattattagtttccataattctacaagaatgtttccttttacttcagttaacaaaagaaaatattcaatagtttaaacatgcaacaatgattaaagttttcatttttaaaaattttaggatgaaggaaacaaggaaatatagggaaaagtagcagacaaaattaacaaactcagacatgttattcatccccaacatgggtctattttgtgcttaaaaataattttaaaatcataaaatattaggtttgtttttggttattatcaataaagttaacactgagcacattttacaaawaaaaaaaaaaaaaaactcgagggggggcccggtacccaattcgccctatagtgagtcgtattacaattcactggccgtcgttttacaacgtcgtgactgggaaaaccctggcgttacccaacttaatcgccttgcagcacatccccctttcgccagctggcgtaatagcgaagaggcccgnaccgatcgcccttcccaacagttgcgcagcctgaatggcgaatggcaaattgtaagcgttaatattttgntaaaattcgcgttaaatttttggtaaatcagctcattttttaaccaataggccgaaatcggcaaaatcccttataaatcaaaaagaatagaccggagataggggttgagtggttggttccagtttgggaaccaggagtccccctatttaaaggaccgngggaccttccaaccgtcaaaa

SEQ ID NO: 1620 - DNA, 1400 bp, Homo sapiens
ggcagagggcttttttccccggagataaatgttgcttctcccacacagtggtttaaattttttttcaatttcgttgcctttacatgaggcatacaccctctagatgaccccagtccttatcgttctctatcatctgacactggcttcgctcagtttctttgtctgcctggctcctgtgggcatttgaatttgcaaatcctgctttagacagtgtaattttatgtattaacttggctaggccacaatacccaggtatttggtcaaacaccagtctagatgttgctgtgaagggattttctagaagagattaacatttaaattggcagtcgttgaataaagcggattacccccctctatctcgggcctttttcaagttagaggcgatgaaacagaccttcaacctggaggaatacagcctctctcaggctaccttggagcaggtattcttagaactctgtaaagagcaggagctgggaaatgttgatgataaaattgatacaacagttgaatggaaacttctcccacaggaagacccttaaaatgaagaacctcctaacattcaattttaggtcctactgcattgttagtttccataattctacaagaatgtttccttttacttmagttaacaaaagaaaacatttaataaacattcaataatgattacagttttcatttttaaaaatttaggatgaaggaaacaaggaaatatagggaaaagtagtagacaaaattaacaaaatcagacatgttattcatccccaacatgggtctattttgtgcttaaaaataatttaaaaatcatacaatattaggttggttwtcggttattatcaataaagctaacactgagaacattttacaaataaaaatatgagktttttagcctgaacttcaaatgtatcagctatttttaaacattatttactcggattctaatttaatgtgacattgactataagaaggtctgataaactgatgaaatggcacagcataacatttaattataatgacattctgattataaaataaatgcatgtgaattttagtacatattgaagttatatggaagaagatagccataatctgtaagaaagtaccgcagttaatattttctttagccaacttatattcaatgtattttttatggatcctttttcaaaggtagtatcagtaggcatagtcattttctgtatcttttcacctcacagttcatgaacatttcccatgtcattatagcacttttgtgttatataattgctgcattaatgttatagctgtattgatgtaataccagagttgttacgttygggttatatgcaagtttatttcttagaaataaaactttgatggacttttaaaaaaaaaaaaaaaaaaaaaaaaaaaaaaaaaaaaactcg

SEQ ID NO: 1621 - DNA, 1550 bp, Homo sapiens
  misc_feature (1506)..(1506): n equals a,t,g, or c
tactaaagggaacaaaagctggagctccaccgcggtggcggccgctctagaactagtggatccyccggkytgcaggaattcggcacgagcaaagccgaggagaaggccttgaagagagtccggaggaaaatcaagaacaagatctcagcccaggagagccgtcgtaagaagaaggagtatgtggagtgtctagaaaagaaggtggagacatttacatctgagaacaatgaactgtggaagaaggtggagaccctggagaatgccaacaggaccctgctccagcagctgcagaaactccagactctggtcaccaacaagatctccagaccttacaagatggccgccacccagactgggacctgcctcatggtggcagccttgtgctttgttctggtgctgggctccctcgtgccctgccttcccgagttctcctccggctcccagactgtgaaggaagaccccctggccgcagacggcgtctacacggccagccagatgccctcccgaagcctcctattctacgatgacggggcaggcttatgggaagatggccgcagcaccctgctgcccatggagcccccagatggctgggaaatcaaccccggggggccggcagagcagcggccccgggaccacctgcagcatgatcacctggacagcacccacgagaccaccaagtacctgagtgaggcctggcctaaagacggtggaaacggcaccagccccgacttctcccactccaaggagtggttccacgacagggatctgggccccaacaccaccatcaaactctcctaggccatgccaagacccaggacataggacggacccctggtacccagaagaggagttcttgctcactaacccggatccgcctcgtgcccctgcctcctggagcttcccattccaggagaaaaggctccacttcccagcccttccttgcccctgacatttggactcttcccttgggccgaccactctgttctcattctccttcccaccaacatccatccgtccttctcagacaaaccactcactgggtaccccacctcctctctcatatgcccaacacgaccactgcctccctgcccccacacctgcacccaaacagacacatcaacgcaccccactcacagacaccccttaccccacccccactgtacagagaccaagaacagaaattgtttgtaaataatgaaccttattttttattattgccaatcccctaagatattgtattttacaaatctccctcttcccttcgcccctcccttgttttatattttatgaagttagtgcgggctttgctgctccctggcccaggaaagagggactacctgaccctcacctggcacccccctgctgctgcccaagccgctgggcctttttaattgccaaactgctctcttcatcagctcagcacatgctttaagaaagcaaaaccaaaaaaaaaaaaaaaaaactcgagggggggcccggtacccaattcgccctatagtgagtcgnattacaattcactggccgtcgttttacaacgtcgtgactgggaa

SEQ ID NO: 1622 - DNA, 1622 bp, Homo sapiens
ggcacgaggaagttagcactctacgtatatgaatatctgctccatgtaggagctcagaaatcagctcaaacatttttatcagagataagatgggaaaaaaacatcacattgggggaaccaccaggattcttacattcttggtggtgtgtattttgggatctctactgtgcagctccagagagacgtgaaacatgtgaacactcaagtgaagcaaaagccttccatgattacagtgctgcagcagctcccagtccagtgctaggaaacattcccccaggagatggcatgccagtaggtcctgtaccaccagggttctttcagccttttatgtcacctcggtaccctggaggtccaaggcccccattgaggatacctaatcaggcacttggaggtgtcccaggaagtcagccattactccccagtggaatggatccaactcgacaacaaggacatccaaatatgggtgggccaatgcagagaatgactcctccaagaggaatggtgcccttaggaccacagaactatggaggtgcaatgagacccccactgaatgctttaggtggccctggaatgcctggaatgaacatgggtccaggtggtggtagaccttggccaaacccaacaaatgccaattcaataccatactcctcagcatctcctgggaattatgtaggtcctccaggaggtggagggccaccaggaacacccatcatgcctagtccagcagattcaaccaactctggtgataacatgtatactttaatgaatgcagtacctcctggacctaacagacctaattttccaatgggccctgggtcagatggtcccatgggtggattaggaggaatggagtcacatcacatgaatggctctttaggctcaggagatatggacagtatttccaagaattctcccaataatatgagcctgagtaatcaaccgggcactccaagggatgatggcgaaatggggggaaatttcttaaatccttttcagagtgagagttactcccctagcatgacaatgagcgtgtgatccattaccaagtctcctcatgaaaaccacagtgagtcagcccttcacagaactactacggaagaaaattattcatcacagtgtacagttaaacaaaggaatctcagtcacaccaaaccaacctttttatttcctgctctctcccctcttttgtgaagaaagcgggtccaaatgtgattcaaacaactgtacggagtggcatattagaattgccctaaactgaactgcaaataattatgtgtgtatgtatatgtgtgggaaagagaatgtactgtatatgtgtatgttatacagacatatacacatacatacattgacccacaggacattgtaaaatattatcacatgacatcttaagtagaaataagtagggacttttattccatcctttttttcacgtttacattttaattattacaagttgctcctgccccctccctgaactattttgtgctgtgtatatcactgctttatataagttattttttaaggtgaactcagatgttatggttttgtaaatgtctgcaatcatggataggaataaaatcgcttatttgagagctttcattaaaaaaaaaaaaaaaaaa

SEQ ID NO: 1623 - DNA, 1753 bp, Homo sapiens
tccggggctgcaggaattcggcacgaggacagtgggagctgctctcggcacaagcatgtacggcaaaggcaagagtaacagcagcgccgtcccgtccgacagccaggcccgggagaagttagcactctacgtatatgaatatctgctccatgtaggagctcagaaatcagctcaaacatttttatcagagataagatgggaaaaaaacatcacattgggggaaccaccaggattcttacattcttggtggtgtgtattttgggatctctactgtgcagctccagagagacgtgaaacatgtgaacactcaagtgaagcaaaagccttccatgattacagtgctgcagcagctcccagtccagtgctaggaaacattcccccaggagatggcatgccagtaggtcctgtaccaccagggttctttcagccttttatgtcacctcggtaccctggaggtccaaggcccccattgaggatacctaatcaggcacttggaggtgtcccaggaagtcagccattactccccagtggaatggatccaactcgacaacaaggacatccaaatatgggtgggccaatgcagagaatgactcctccaagaggaatggtgcccttaggaccacagaactatggaggtgcaatgagacccccactgaatgctttaggtggccctggaatgcctggaatgaacatgggtccaggtggtggtagaccttggccaaacccaacaaatgccaattcaataccatactcctcagcatctcctgggaattatgtaggtcctccaggaggtggagggccaccaggaacacccatcatgcctagtccagcagattcaaccaactctggtgataacatgtatactttaatgaatgcagtacctcctggacctaacagacctaattttccaatgggycctgggtcagatggtcccatgggtggattaggaggaatggagtcacatcacatgaatggctctttaggctcaggagatatggacagtatttccaagaattctcccaataatatgagcctgagtaatcaaccgggcactccaagggatgatggcgaaatggggggaaatttcttaaatccttttcagagtgagagttactcccctagcatgacaatgagcgtgtgatccattaccaagtctcctcatgaaaaccacagtgagtcagcccttcacagaactactacggaagaaaattattcatcacagtgtacagttaaacaaaggaatctcagtcacaccaaaccaacctttttatttcctgctctctcccctcttttgtgaagaaagcgggtccaaatgtgattcaaacaactgtacggagtggcatattagaattgccctaaactgaactgcaaataattatgtgtgtatgtatatgtgtgggaaagagaatgtactgtatatgtgtatgttatacagacatatacacatacatacattgacccacaggacattgtaaaatattatcacatgacatcttaagtagaaataagtagggacttttattccatcctttttttcacgtttacattttaattattacaagttgctcctgccccctccctgaactattttgtgctgtgtatatcactgctttatataagttattttttaaggtgaactcagatgttatggttttgtaaatgtctgcaatcatggataggaataaaatcgcttatttgagagctttcattaaaaaaaaaaaaaaaaaactcgagggggggcccggtacccaat

SEQ ID NO: 1624 - DNA, 1994 bp, Homo sapiens
ccacgcgtccgcctgagtgggtgcgccgagtcatggagggcgcagagctggccgggaagatcctttccacctggctgacgctggttctcggcttcatccttttaccttcggtcttcggagtgtctctgggcatctccgagatctacatgaagatcctagtgaaaactttagagtgggccacaatacgaattgaaaaaggaaccccaaaggagtcgattcttaaaaactctgcttctgttggtattatccaaagagatgagtcacccatggaaaaagggctctctggtctacgaggaagggactttgagctgtctgacgtgttttatttctccaagaagggattggaagccattgtagaagatgaagtgacccagaggttttcctcagaggagctagtgtcatggaatctcctcacaagaaccaatgtaaatttccagtacatcagtctgcggctcactatggtgtgggtgctgggcgtcatagtgcgctattgtgtcctactgcctctgaggtaagtcatatgcctggtaatttgatgatacgcttgactcagctttctttttgaatcatgtacataatggccacgtaagtgttctgtggtgcttattccacccattcccacgtaggaaatgccaccaaacatgacctctaaaggaatgtattacgtatccattttcctttcacaatttttccccaaatgaagttgtatattcagaatccaatgtatatcttagaatctggatccactttgctattagagtctgagctaacttgaggatggagagaaaagggaagtgaagaagaagaagaggaagaggaagaagaagaagagagatcatcaacagtttcatattcactagagcatcagccaaactgtaagagctgaccagaacccactgcctttctttgccagtccatagcacttcataactgcataagagagaaaaaattcttgagtgtggttacacgtgggagagagccatttcgaagtgtgtttgttccatccaattcattgtgatcacggactgctcttattaaagtgtccccacctgggtccccttctgcttctgagcttgagtgccacctggtgaggaggcagtgtcaagcctagtttatggaaagcacgatgtggaacatgagtagaaggcactgcgtggtgggatgaagctgtaagtggctgagatctgattagcgtggtggtagcagtagtaggcacgtataccagccacaacattattgttgatcatcttgcttcatttccctggacatggccttggcatcctctcagcagagctttccaggcagtggctacctgccaactaaacttggcacatgaattgaaatctttttaccacccccagggtggcctatgcttgcctcattcagatttattaccagggaaagtattgcttaactacagggaaatgcagatttctaagaaattatttctgggttgttgttgttgtttttttttgcccatattgctagttcagacattggggcatagtatgtcttttgggaatcatttcagctgtgataatgaagcgaaattcaaggtttcacatataattttgcttgaaccttaaactagtgcccccaaaacagggttcgtgtactctgggagtgtacaagactatccattggcatgcaggaaggaaatattagagctcttatttactaaaagcttctgttctggctgggtgcagtggctcacgcctgtaatcccagcactttgggaggccgaggtgggcggatcacaagatcaagagatcgagaccatcctggccaacatggtgaaacctcatctctactaaaaatacaaaaattaactgggcgtggtggagcacacctagtctcagctactcgggaggctgagacaggagaatcgcttgaacctgggaggcagaggttgcagtgagctgtgatcgtgccactgcactctagcctggcaacagagcgagactgcgtatccaaaaaaaaaaaaaaaaaaaaaa

SEQ ID NO: 1625 - DNA, 1994 bp, Homo sapiens
ccacgcgtccgcctgagtgggtgcgccgagtcatggagggcgcagagctggccgggaagatcctttccacctggctgacgctggttctcggcttcatccttttaccttcggtcttcggagtgtctctgggcatctccgagatctacatgaagatcctagtgaaaactttagagtgggccacaatacgaattgaaaaaggaaccccaaaggagtcgattcttaaaaactctgcttctgttggtattatccaaagagatgagtcacccatggaaaaagggctctctggtctacgaggaagggactttgagctgtctgacgtgttttatttctccaagaagggattggaagccattgtagaagatgaagtgacccagaggttttcctcagaggagctagtgtcatggaatctcctcacaagaaccaatgtaaatttccagtacatcagtctgcggctcactatggtgtgggtgctgggcgtcatagtgcgctattgtgtcctactgcctctgaggtaagtcatatgcctggtaatttgatgatacgcttgactcagctttctttttgaatcatgtacataatggccacgtaagtgttctgtggtgcttattccacccattcccacgtaggaaatgccaccaaacatgacctctaaaggaatgtattacgtatccattttcctttcacaatttttccccaaatgaagttgtatattcagaatccaatgtatatcttagaatctggatccactttgctattagagtctgagctaacttgaggatggagagaaaagggaagtgaagaagaagaagaggaagaggaagaagaagaagagagatcatcaacagtttcatattcactagagcatcagccaaactgtaagagctgaccagaacccactgcctttctttgccagtccatagcacttcataactgcataagagagaaaaaattcttgagtgtggttacacgtgggagagagccatttcgaagtgtgtttgttccatccaattcattgtgatcacggactgctcttattaaagtgtccccacctgggtccccttctgcttctgagcttgagtgccacctggtgaggaggcagtgtcaagcctagtttatggaaagcacgatgtggaacatgagtagaaggcactgcgtggtgggatgaagctgtaagtggctgagatctgattagcgtggtggtagcagtagtaggcacgtataccagccacaacattattgttgatcatcttgcttcatttccctggacatggccttggcatcctctcagcagagctttccaggcaggaaatacctgccaactaaacttggcacatgaattgaaatctttttaccacccccagggtggcctatgcttgcctcattcagatttattaccagggaaagtattgcttaactacagggaaatgcagatttctaagaaattatttctgggttgttgttgttgtttttttttgcccatattgctagttcagacattggggcatagtatgtcttttgggaatcatttcagctgtgataatgaagcgaaattcaaggtttcacatataattttgcttgaaccttaaactagtgcccccaaaacagggttcgtgtactctgggagtgtacaagactatccattggcatgcaggaaggaaatattagagctcttatttactaaaagcttctgttctggctgggtgcagtggctcacgcctgtaatcccagcactttgggaggccgaggtgggcggatcacaagatcaagagatcgagaccatcctggccaacatggtgaaacctcatctctactaaaaatacaaaaattaactgggcgtggtggagcacacctagtctcagctactcgggaggctgagacaggagaatcgcttgaacctgggaggcagaggttgcagtgagctgtgatcgtgccactgcactctagcctggcaacagagcgagactgcgtatccaaaaaaaaaaaaaaaaaaaaaa

SEQ ID NO: 1626 - DNA, 648 bp, Homo sapiens
cccacgcgtccgcccacgcgtccgggtgcgccgagcaggagcagggaacaaaggagcggagaggggaggggagagagttgggcgagggagagcccccggccggctgccagaagatcccggcgggaggaagcccaagtgtcacttgaattccacccaaggagcgggcgcctgggatcagagcgtcctgtttagcaataacggctggagcacgtcctacaagttacgggagagtcggctgtgaaggagacgttcgcttatcccctgtgtccccgctcctggcccctccagacccccgccttgcctcgcgctgggaggggagatccagaatgaaaggcaagaaaggtattgttgcagcatctggcagtgagactgaggatgaggacagcatggacattcccttggacctttcttcatccgctggctcaggcaagagaaggagaaggggcaacctacccaaggagtctgtgcagattcttcgggattggctgtatgagcaccgttacaatgcctatccttcagagcaagaaaaagcgttgctgtcccagcaaacacacctgtctacgctacaggtctgtaactggttcatcaacgcccgccgcaggctcctccctgacatgctgagaaaggatggcaaagatccaaatcagt

SEQ ID NO: 1627 - DNA, 1405 bp, Homo sapiens
cccacgcgtccgggctgtgaaggagacgttcgcttatcccctgtgtccccgctcctggcccctccagacccccgccttgcctcgcgctgggaggggagatccagaatgaaaggcaagaaaggtattgttgcagcatctggcagtgagactgaggatgaggacagcatggacattcccttggacctttcttcatccgctggctcaggcaagagaaggagaaggggcaacctacccaaggagtctgtgcagattcttcgggattggctgtatgagcaccgttacaatgcctatccttcagagcaagaaaaagcgttgctgtcccagcaaacacacctgtctacgctacaggtctgtaactggttcatcaacgcccgccgcaggctcctccctgacatgctgagaaaggatggcaaagatccaaatcagttcacaatttcccgccgtggggccaagatttctgaaacgagctctgtggagtccgtgatgggcatcaaaaacttcatgccagctctagaggagaccccatttcattcctgtacagctgggccaaacccaaccctagggaggccactgtctcctaagccgtcatccccgggatcagttttggctcgtccatcagtgatctgccataccactgtgactgcattgaaagatgtccctttctctctctgccagtcggtcggtgtgggacaaaacacagatatacagcagatagcggccaaaaacttcacagacacctctctcatgtacccagaggacacttgtaaatctggaccaagtacgaatacacagagtggtcttttcaacactcctccccctactccaccggacctcaaccaggacttcagtggatttcagcttctagtggatgttgcactcaaacgggctgcagagatggagcttcaggcaaaacttacagcttaacccattttcaagcaaaacagttctcagaaatgtcatgattgccggggtgaaggcaagagatgaattgcattattttatatattttttattaatatttgcacatgggattgctaaaacagcttcctgttactgagatgtcttcaatggaatacagtcattccaagaactataaacttaaagctactgtagaaacaaagggttttcttttttaaatgtttcttggtagattattcataatgtgagatggttcccaatatcatgtgatttttttttcctccccttccctttttttgttattttttcagactgtgcaatacttagagaacctatagcatcttctcattcccatgtggaacaggatgcccacatactgtctaattaataaattttccattttttttcaaacaagtatgaatctagttggttgatgccttttttttcatgacataataaagtattttctttaaaaaaaaaaaaaaaa

SEQ ID NO: 1628 - DNA, 1072 bp, Homo sapiens
  misc_feature (1038)..(1038): n equals a,t,g, or c
  misc_feature (1040)..(1040): n equals a,t,g, or c
ggggctggaatggggccgcccggctccccatggcagtgggtgacgctgctgctggggctgctgctccctcctgccgcccccttctggctcctcaatgtgctcttccccccgcacaccacgcccaaggctgagctcagtaaccacacacggcccgtcatcctcgtgcccggctgcctggggaatcagctagaagccaagctggacaaaccagatgtggtgaactggatgtgctaccgcaagacagaggacttcttcaccatctggctggatctcaacatgttcctaccccttggggtagactgctggatcgataacaccagggttgtctacaaccggagctctgggctcgtgtccaacgcccctggtgtccagatccgcgtccctggctttggcaagacctactctgtggagtacctggacagcagcaagctggcagggtacctgcacacactggtgcagaacctggtcaacaatggctacgtgcgggacgagactgtgcgcgccgccccctatgactggcggctggagcccggccagcaggaggagtactaccgcaagctcgcagggctggtggaggagatgcacgctgcctatgggaagcctgtyttcctcattggccacagcctcggctktctacacttgctctatttcctgctgcgccaccccaggcctggaaggaccgctttattgatggcttcatctctcttggggctccctggggtggctccatcaagcccatgctggtcttggcctcaggtgacaaccagggcatccccatcatgtccagcatcaagctgaaagaggagcagcgcataaccaccacctccccctggatgtttccctctcgcatggcgtggcctgaggaccacgtgttcatttccacacccagcttcaactacacaggccgtgacttccaacgcttctttgcagacctgcactttgaggaaggctggtacatgtggctgcagtcacgtgacctcctggcagggactcccagcacctggtgtggaagtatactgtctttacggcgtgggsctngncccgcacctacattacgaccacggtttcccta

SEQ ID NO: 1629 - DNA, 932 bp, Homo sapiens
  misc_feature (54)..(54): n equals a,t,g, or c
  misc_feature (141)..(141): n equals a,t,g, or c
  misc_feature (334)..(334): n equals a,t,g, or c
  misc_feature (387)..(387): n equals a,t,g, or c
agtcatcccattcctcctctctaatctgcaaaagcttttagcgagttggggaanccaggataagtatccggtgccgcatcggtggggtcgccatcgcgaatgatcccatcagttatagcgagctccgccagttatggctanagccgtcgcgagccgcctaactaggcgtagcctagtgggcgattcatcgtggggagcgtcagctgggcgcaaggaagggaaagaaggggaaggcttccaagacgcgctgaatatcctactaatagatcatagataatcgagcagaagtcgagctttagggtcaagtccaggagtagccggcttaaacgtgtcnaaaggggcccccgccggcggtggaagaaaatctttcagggtggcaggcgggtnaagtggggctcccaggaagcagcatatgccacatcatattctatgtccgctgcaagttattttcttaatttgattttttggtgggattcatttagaattgggggggggggggggggggggggggggggggggggggggggggggggggggggggggggggggggggggggggggggggsgttgataagctaccctgtctcaccatgtgctggtgtggaaacggggcccagccagcacgcctcaaggtagatggaatccccactggtcagagaaaaagctatgcggacactccagcttggcctgggtcacagcactgactcctcacccgctagtctggctgttaagaggagaaagtgcactgccttccagcccaggaggaggacagcattttgtatttgttccactgatgcagcttagaaccacacccctgagagtcgtggcaaacctttcacaacctggaaaatgttgaaagcaaccattcctatttttgtttgttttttattaaatcttgcacaaaaaaacssacgcgtgggcggacgcgtggg

SEQ ID NO: 1630 - DNA, 743 bp, Homo sapiens
ccacgcgtccgcagcttcaggcgtctgggctgtggccactgaggaaagagatcctgctctggggacttccagtctgagtatcagaggagaagaggctcgggaggttttgcggggggatagaggaggtggggatggagcctttccttcagagctgccagtttcagagtagaagagctggagttctgctttgggtccctcagtctgggttcaaggaaagagggggaggcaggttttttgatccagtgctgtccccacccccacccctgtgctgttgaggatgcagaaagaccctccctagggcccctctggcctcccaggcatggctcaccttctcctctgctctcccwgccagctttacctgctgttcctgagccttacgctggccactgtcaacgcccgctggctggaaccccgcaccacagctgccatgtgggccctgcaaaccgtggagaaggagcgaggcctgggtggggaggtaccaggcagccaccagggtcccgatccctaccgccagctgcgagagaaggaccccaagtacagtgctctccgccagaatttcttccgctaccatgggctgtcctctctttgcaatctgggctgcgtcctgagcaatgggctctgtctcgctggccttgccctggaaataaggagcctctagcatgggccctgcatgctaataaatgcttcttcagaaaaaaaaaaaaaaaaaaaaaaaaaaaaaaaaaaaaaaaaagggcggccgc

SEQ ID NO: 1631 - DNA, 614 bp, Homo sapiens
  misc_feature (3)..(3): n equals a,t,g, or c
tcncgggaccagcgttccgggamgcgtgggtcgacccacgcgtccgccataccctgcaggcttcctgcttttccgaagccttccccgacataccttcggactagtgcagagcaaactcttccccttctacttccacatctccatgggctgtgccttcatcaacctctgcatcttggcttcacagcatgcttgggctcagctcacattctgggaggccagccagctttacctgctgttcctgagccttacgctggccactgtcaacgcccgctggctggaaccccgcaccacagctgccatgtgggccctgcaaaccgtggagaaggagcgaggcctgggtggggaggtaccaggcagccaccagggtcccgatccctaccgccagctgcgagagaaggaccccaagtacagtgctctccgccagaatttcttccgstamcatgggctgtcctctctttgcaatctgggctgcgtcctgagcaatgggctctgtctcgctggccttgccctggaaataaggagcctctagcatgggccctgcatgctaataaatgcttcttcagaaaaaaaaaaaaaaaaaaaaaaaaaaaaaaaaaaaaaaaaagggcggccgc

SEQ ID NO: 1632 - DNA, 695 bp, Homo sapiens
  misc_feature (2)..(2): n equals a,t,g, or c
  misc_feature (29)..(29): n equals a,t,g, or c
  misc_feature (43)..(43): n equals a,t,g, or c
  misc_feature (51)..(51): n equals a,t,g, or c
antaagggaacaaaagttggagttcaacngcgttggcggccgntctagaantagtggatccccggggctgcaggaattcggcacgagccggcgcttggatcccgagtcgcacccagcgaagagagcgggcccgggacaagctcgaactccggccgcctcgcccttccccggctccgctccctctgccccctcggggtcgcgcgcccacgatgctgcagggccctggctcgctgctgctgctcttcctcgcctcgcactgctgcctgggctcggcgcgcgggctcttcctctttggccagcccgacttctcctacaagcgcagcaattgcaagcccatcccggtcaacctgcagctgtcccacggcatcgaataccagaacatgcggctgcccaacctgctgggccacgagaccatgaaagagcacggctgaccatttctgctccgggatctcagctcccgttccccaagcacactcctagctgctccagtctcagcctgggcagcttccccctgccttttgcacgtttgcatccccagcatttcctgagttataaggccacaggagtggatagctgttttcacctaaaggaaaagcccacccgaatcttgtagaaatattcaaactaataaaatcatgaatatttttatgaaaaaaaaaaaaaaaaaaaaaaaaaaaagggggcggacgcgtggg

SEQ ID NO: 1633 - DNA, 3580 bp, Homo sapiens
ggccatttgtattgaagaaattggagtatggatgaaaatgtatagtgatgccttcctaaatgacagttacctaaaatatgttggctggactcttcatgacaggcaaggggaagtcaggctgaagtgtttgaaagctctgcagagtctatataccaatagagaattattccccaaattggaactattcactaaccgattcaaggatcgcattgtatcaatgacacttgataaagaatatgatgttgctgtggaagctattcgattggttactctgatacttcatggaagtgaagaagctctttccaatgaagactgtgaaaatgtttaccacttggtgtactcggcacatcgccctgttgctgtggcagctggagagttccttcacaaaaagctatttagcagacatgacccacaagcagaagaagcattagcaaagaggaggggaagaaacagcccgaatggaaacctcattaggatgctggttcttttctttcttgaaagtgagttacatgaacatgcagcctacttggtggacagtttatgggagagctctcaagaactgttgaaagactgggaatgtatgacagagttgctattagaagaacctgttcaaggagaggaagcaatgtctgatcgtcaagagagtgctcttatagagctaatggtttgtacaattcgtcaagctgctgaggcacatcctccagtgggaaggggtaccggcaagagagtgctaactgccaaagaaaggaaaactcaaattgatgatagaaacaaattgactgaacattttattattacacttcctatgttactgtcaaagtattctgcagatgcagagaaggtagcaaacttgctacaaatcccacagtattttgatttagaaatctacagcacaggtagaatggaaaagcatctggatgctttattaaaacagattaagtttgttgtggagaaacacgtagaatcagatgttctagaagcctgcagtaaaacctatagtatcttatgcagtgaagaatataccatccagaacagagttgacatagctcgaagccagctgattgatgagtttgtagatcgattcaatcattctgtggaagacctattgcaagagggagaagaagctgatgatgatgacatttacaatgktctttctacattaaagcggttaacttcttttcacaatgcacwtgatctcacaaaatgggatctctttggtaattgctacagattattgaagactggaattgaacatggagccatgccagaacagataggtcgtgcaagcactgcagtgttcccattattcgattctttggcagtyggtgaaaattactgatggctctccttccaaagaggatttgttggtattgaggaaaacggtgaaatcctttttggctgtttgccagcagtgcctgtctaatgttaatactccagtgaaagaacaggctttcatgttactctgtgatcttctgatgattttcagccaccaattaatgacaggtggcagagagggccttcagcctttggtgttcaatccagatactggactccaatctgaactcctcagttttgtgatggatcacgtttttattgaccaagacgaggagaaccagagcatggagggtgatgaagaagatgaagctaataaaattgaggccttacataaaagaaggaatctacttgctgctttcagcaaacttatcatttatgacattgttgacatgcatgcagctgcagacatcttcaaacactacatgaagtattacaatgactatggtgatattattaaggaaacactgagtaaaaccaggcagattgataaaattcagtgtgccaagactctcattctcagtttgcaacagttatttaatgaacttgttcaagagcaaggtcccaacctagataggacatctgcccatgtcagtggcattaaagaactggcacgtcgctttgcccttacatttggattggaccagattaagacacgagaagcagttgccacacttcacaaggatggcatagagtttgcatttaaataccaaaatcagaaaggacaagagtatccacctcctaatctggcttttcttgaagtactaagtgaattttcttctaaacttcttcgacaggacaaaaagacagttcattcatacctagagaaattccttaccgagcagatgatggaaaggagggaggatgtatggcttccactcatctcctatagaaattcattagtcactgggggtgaagatgatagaatgtctgtgaacagtggaagtagcagcagcaaaacctcatcagtaaggaataagaaaggacgacctccacttcataaaaaacgagtagaagatgagagtctggataacacatggctaaacaggactgacaccatgattcagactcctggccccctgccagcaccacaactcacatccactgtactgcgggagaacagtcggcccatgggagaccagattcaagaacctgagtctgaacatggttctgaaccagactttttacacaatcctcagatgcagatctcttggttaggccagccgaagttagaagacttaaatcggaaggacagaacaggaatgaactacatgaaagtgagaactggagtgaggcatgctgttcggggtctaatggaggaagatgctgagcccatctttgaagatgtgatgatgtcatcccgaagccagttagaagatatgaatgaagaatttgaggacaccatggttattgatctgcctccatcaagaaatcggcgagagagagctgagctaaggccagacttctttgactctgcagctatcatagaagatgattcaggatttggaatgcctatgttctgaagtctgaagaaaatttacaaatctggaactctattatttagagctagaggcctatatactgtgatagcttgtatggggaaaaacacttttgatgtgatctgatttgttttttaatcaaatgattaaggtcaatccctttttgcagtgacagaagaggagcatgtaaattacccaagggaatgttggtgaatgtcaactcagaaagactgacctgaaaatcatttgtgtcctactattggacttatcccaatacagatgtgtgtgtttttctggagggaggaagaaattttaaatttttaaaacagctgtcaagataaacactgttatacacctgttttatgaaaactcaacattgagtaaaaaaaaacatatttttaactttattttcctgttgtacaatttaaaaaccgttttaacattttgcctttttatgttttaaaagctaaccatttttattaaacctatgagtaagcagctcatcctaattgcgaagagtgttttggagttcactggatttggttgacctttgtggaacacaaataatgaaggagcagaacattgacaagctaagatgaaattctgacatagtacatctctgccaaaaaccacacaccctctgtggatatggatatgaattcccagattttatatactcttgaataaaaggtttatttttaaaaaaaaaaaaaaaaaaaaaaaaaaaaaaaaaaaaaaagggcggccgc

SEQ ID NO: 1634 - DNA, 860 bp, Homo sapiens
  misc_feature (5)..(5): n equals a,t,g, or c
  misc_feature (7)..(7): n equals a,t,g, or c
  misc_feature (16)..(16): n equals a,t,g, or c
  misc_feature (56)..(57): n equals a,t,g, or c
gggcncntccccttcntcctcccgggacgacaaggcaatgatcagaccttattagnnactgtttcmagaaccagattggaaagacaatgaagcctttattgagccactacattaaaagtatatattgctttactgccttcaataccagtattacatcaatgcatgtatcagaaacttcacagaaattacatggcaactcttgtagctaagaaagtaattctgaggtgtacatttgtcttgcctttttaaatttataaacttgccctaaaaggagatgcatatctgggaaactgaactgtctttttgcagtttagccttcatgtatataaaatatgccattaattttattggggaagaaattccatccaaaaatgttgcctacagctatgagttaagagtgtctgtacagtgtgtagcttttattttctaaaatcacagatagggcatgtatatgacttataaatatataaatacgattttgtattaaaagttttgtagtttatggcaaaatctggtcctgtggtaggctaaataagtactgtccctgtgaaaggaatgtttgtggctcatgtcagtgtgtgaatgcatagacaatttgaagtttttgatatatttgtgatatttatcttgagcactgcaatctcaccccccccccgcccaccaagggaattcaatgggaatgtttattgtgactttgtcctctgttgcattttaaagttatttcctgtaatttattttcagtacataattaaaaatttgttgtatatataaaaraaaaaaaaaaaaaaaacgagggsggccgctctagaggatccctcgaggggcccaagcttacgcgtgcatgcgacgtcatagctctc

SEQ ID NO: 1635 - DNA, 2824 bp, Homo sapiens
  misc_feature (7)..(7): n equals a,t,g, or c
aaattanccctcactaaagggaacaaaagctggagctccmccgcggtggcggccgctctagaactagtggatcccccggkytgcaggawttcggywcgagaccagctgctcctggccttgctgaagtgcacagacacggagctgcagctgcgcagagacgcgatcttctgccaggccctggtggccgccgtgtgcaccttctccgagcagctgctggcggccctgggctaccgctacaacaacaatggcgagtacgaggagagcagccgcgacgccagccgcaagtggctggagcaggtggcggccacgggcgtcctgctgcactgccagtccctgctctcgccagccacagtgaaggaggaacggaccatgctggaggacatctgggtgacgctgtcagagctggacaatgtcaccttctcctttaagcagctggacgagaactatgtggccaacaccaacgtcttctaccacattgagggcagccggcaggcgctgaaggtcatcttctacctcgacagctaccacttctccaagctgccctcccgcctggagggtggggccagcctgaggctgcacacagcgctgttcacgaaagtgctggagaacgtggaggggctgccttctccaggcagccaggccgcggaggatttgcagcaggacatcaacgcgcagtccctggagaaagttcagcagtattaccgcaaactcagggcattttacctggagcggtctaacctgcccacggatgccagcaccacggcggtaaagatagaccagctgatccgccccatcaatgccctggatgagctctgccgcctcatgaagtcctttgtccacccaaagcctggtgctgctgggagtgtgggcgccggcctcatccccatctcctcggagctctgctaccgcctgggggcctgccagatggtcatgtgtggcacaggcatgcagaggagcaccctgagcgtgtccctggagcaggcggccatcttggcacggagccacgggttgctgcccaagtgcatcatgcaggccacggacatcatgcggaagcagggcccaagggtggagattctggccaaaaacctgcgagtcaaggaccagatgccccagggtgctccgcgcctctaccgcctctgccagccgccggtggatggggacctctgaacacccaaatgccccacgctgggccgcggcctctggagctgggatttgggaggacacagcaggcagcgctggccttctccagggatggcccaaggcttccgcagccgcccgttccgggacctgcccagcgtcctccctgcctccttccgggacaagcctggccaccctcgctgtgatgacgagctggctgattggccctgggccggcccattcttcacacgcctgccagaagctggaggggtgctggagacccatagagctgatgggagcagctggtgcctggccttcggctcctgcgtccccagaacccaagggaacgtcatggaggccacatggggccacccggctccctcgggatggctccgcctgcacttttgaaaccccggtttccttcaacgtccacattccaggtgaccacacgtgtctcctcctcctcatcttagcttccaggttcaccctaaccctgtactaacctgcttggtggacttggaaaagacttggctctgtcgggaaaggagagacggggcctccatcacgcctgttaccagaggatccccgagagccacaccagctctggacatcaccgcccctggaactggggccaccagccctgggcacgagatttgctctgactttatttatatggcatgaaatctctggtttattttgggattttttgttgttggtgttgtcaaagtttgttttttctaaagttgtgtgattatatatttgacattttacatttcaaagaaaggtatgttgtctaacaggggaccaacagaaggtagtattgacaactgttcctgcttctactaaaaaaaaaagagcacaaaagaaaaactaaattattgaaaaattaaaaaatgtcattgtttcctgtttgttaatattagggttgtaaggtgtcgttttgaggtatcgactgtgattccttcccccaccctccattctccagcggttggccggtgttagaactcgctctctttgagtgactggctacaagggcctgagaggtggccagccagggttggagctggaggggatggagccccacctgaggtgccgtgtcacacgggttagagggtcactgggaaacaccgggcggtggcttctgtgatttattttcttgatggtaacttctcagagcagggcgattgggacatcaccagccagagcacaggaagccaccctgcctgctggggaggagggacccacacaagccccctcggcagtttgtccccccagcttcggtatgccttcagggaaaggtcacagctggggaggaagcggggggacgcctgtcacccctggcaggtggtgagttcaggtgggggctccctgctgcccccaggcctgggagcttgaagccctcccggcatctggcatccgagcctcccgccctccagggtgcgcttccctctcttgccgcagcatacacgagggcaggcagtggccttgtcactgtatcttgcatcagagacaaaggaggacccgctttagccctgctgcgggaaatgggggagggcccagggccagcgcattgtgcactggtttactttaaaatgtacagattcttctcgttaaattcttgatagattttttattattattaaaagtcagtttataatacaaagaaaaaaaaaaaaaaaaaactcga

SEQ ID NO: 1636 - DNA, 1723 bp, Homo sapiens
  misc_feature (1655)..(1655): n equals a,t,g, or c
  misc_feature (1669)..(1669): n equals a,t,g, or c
  misc_feature (1675)..(1675): n equals a,t,g, or c
  misc_feature (1684)..(1684): n equals a,t,g, or c
  misc_feature (1710)..(1710): n equals a,t,g, or c
agaacggccttccccacatcttccagcacctgcgcgcctgaatccgtcccacccaggcccagacgcaggcttcttcctcgggtcttggtcctgcatcctctctctcccagagcctccgttagggggtgggaaaggactttgccataggtcgctgaggccaccatctgctctcttactggccaagggcgtaaaaagatagtcytcccattagctagagagcaaaccccagaaagcctattggctgcgccgtccgcgggccttggtccgctttgaaggcgggctgcggctgcgagaggagggcgggcgggaggctagctgttgtcgtggttgctcggaggcacgtgtgcagtcccggaagcggcgaggggaaactgctccgcgcgcgccgcgggaggaggaaccgcccggtcctttagggtccgggcccggccgggccatggattcaatgcctgagcccgcgtcccgctgtcttctgcttcttcccttgctgctgctgctgctgctgctgctgccggccccggagctgggcccgagccaggccggagctgaggagaacgactgggttcgcctgcccagcaaatgcgaagggacttgcggttaatcgaagtcactgagaccatttgcaagaggctcctggattatagcctgcacaaggagaggaccggcagcaatcgatttgccaagggcatgtcagagacctttgagacattacacaacctggtacacaaaggggtcaaggtggtgatggacatcccctatgagctgtggaacgagacttctgcagaggtggctgacctcaagaagcagtgtgatgtgctggtggaagagtttgaggaggtgatcgaggactggtacaggaaccaccaggaggaagacctgactgaattcctctgcgccaaccacgtgctgaagggaaaagacaccagttgcctggcagagcagtggtccggcaagaagggagacacagctgccctgggagggaagaagtccaagaagaagagcagcagggccaaggcagcaggcggcaggagtagcagcagcaaacaaaggaaggagctgggtggccttgagggagaccccagccccgaggaggatgagggcatccagaaggcatcccctctcacacacagcccccctgatgagctctgagcccacccagcatcctctgtcctgagacccctgattttgaagctgaggagtcaggggcatggctctggcaggccgggatggccccgcagccttcagcccctccttgccttggctgtgccctcttctgccaaggaaagacacaagccccaggaagaactcagagccgtcatgggtagcccacgccgtcctttcccctccccaagtgtttctctcctgacccagggttcaggcaggccttgtggtttcaggactgcaaggactccagtgtgaactcaggaggggcaggtgtcagaactgggcaccaggactggagccccctccggagaccaaactcaccatccctcagtcctccccaacagggtactaggactgcagccccctgtagctcctctctgcttacccctcctgtggacaccttgcactctgcctggcccttcccagagcccaaagagtaaaaatgttctggttctgaaaaaaaaaaaaaaaaaactcgaggggggcccggncccaattcgccctnttgggnggggaatanaattacttggccggggtttacaacgnggggatggaaaaa

SEQ ID NO: 1637 - DNA, 1751 bp, Homo sapiens
gcggccgcgtgcgcggacgcgctgcgccctactgcgtggcggaggtcgccgcaggccccagcgcgctgccggggccgtgccggcgaggatggctcagggacgcggtcacctcccgccgcttgcagcagcgccgatggacccaagccggggcacgcgccggcgacgacgacccgcatcggctcctccagcagctcgtgctctcgggaaacctcatcaaggaagccgtgcggagactccaacgagccgtcgccgcggttgcagccacgggccccgcaagcgcccctgggcccgggggaggccgcagcggacctgaccgcattgccctgcagccctcaggctccttgctctgacgcaggcctcctggaggaggaagtggaggccgctgcgtagacccaacagcgtccagttcctactaactctgagctgaagccgacgtcgccagcctgggagcgaccactttggctgcggggaggcgcgtggggagagatctcaaccagagaagttaccagccgcggcgaggccgtcggagaaaacttaagcgtggagaaatgtatgcgccagggtgcttccgtggggcatgagaatttcccgggccatccaagcccaaggacctgggataaactgggagaactatggcagctacttgcatcgacttgtacctcacttagcccttgggggcktcgtgagcttggattgtttaaggagggctcaggggtaggaatcgcgatggctttataacaatacttgaaaactaacgacacgcatacattttcttattttctggtggaggagcttagtaagtggtgctacaattgctgtgcaaagaaattccagaggggagaagaatgtaaaagtttggtggtgggtggcttggcattgcccctttttcccaccgattcggtggctggtgaaggtgggagatgtgaactccaattaagggactggagagaggtgaagaattttgcaggtgggagatttggatttgaatgtggacttgtaaatgacttgaccttgccatctgtgttcaaggtcacggtttgctgtggggttcctgggagagcttactcaccccggagtcttttctttctcttgctccaagaagagccctgttggtgctttaccaccgcttggagtctcccgaggacacaaacaggcagagagggacgtgtagggagagttctttcctgttttctgtgctttcctttttacaggactcccggaaggccactcatggccatgccaggagctttctcagaaacagtcataaacgatctcttgagtctctttcttgtcctcccagctgagctttcttattccaccctttctggtgtctataggaatgcatgagagaccctggacgtttttctgctctcttctggccctccatggagccatgggcctcggcctcggcggctcctcaccctcacaatttatttcctcctcccgtgccagcccttcttttgtgtctgaaaccggttttaaaatgtgactctcccagagaagaagccgctggctgtatgaaacttgacggcgcttttgtaaggtgccacccccaaactttaaggtagctaaaccaatttttaaaagattcaatggcttgttcatcctccagatgtagctattgatgtacacttcgcaacggagtgtctgaaattgtggtggtcctgatttataggatttcataattaaaatgtctgctgaataaaaaaaaaaaaaaaaaactcgaggggggcccggtacccaattcgccg

SEQ ID NO: 1638 - DNA, 952 bp, Homo sapiens
ggcacgagcttattttctggtggaggagcttagtaagtggtgctacaattgctgtgcaaagaaattccagaggggagaagaatgtaaaagtttggtggtgggtggcttggcattgcccctttttcccaccgattcggtggctggtgaaggtgggagatgtgaactccaattaagggactggagagaggtgaagaattttgcaggtgggagatttggatttgaatgtggacttgtaaatgacttgaccttgccatctgtgttcaaggtcacggtttgctgtggggttcctgggagagcttactcaccccggagtcttttctttctcttgctccaagaagagccctgttggtgctttaccaccgcttggagtctcccgaggacacaaacaggcagagagggacgtgtagggagagttctttcctgttttctgtgctttcctttttacaggactcccggaaggccactcatggccatgccaggagctttctcagaaacagtcataaacgatctcttgagtctctttcttgtcctcccagctgagctttcttattccaccctttctggtgtctataggaatgcatgagagacctggacgtttttctgctctcttctggcctccatggagccatgggctcggctcggcggctcctcacctcacaatttatttcctcctcccgtgccagcccttcttttgtgtctgaaaccggttttaaaatgtgactctcccagagaagaagccgctggctgtatgaaacttgacggcgcttttgtaaggtgccacccccaaactttaaggtagctaaaccaatttttaaaagattcaatggcttgttcatcctccagatgtagctattgatgtacacttcgcaacggagtgtctgaaattgtggtggtcctgatttataggatttcataattaaaatgtctgctgaataaaaaaaaaaaaaaaaaa

SEQ ID NO: 1639 - DNA, 2628 bp, Homo sapiens
  misc_feature (2628)..(2628): n equals a,t,g, or c
ataggcttttgcaaaaagctatttaggtgacactatagaaggtacgcctgcaggtaccggtccggaattcccgggtcgacccacgcgtccgaggcgctgctgctggagcggccgatccgagacgtggctccctgggcggcagaaccatgttggacttcgcgatcttcgccgttaccttcttgctggcgttggtgggagccgtgctctacctctatccggcttccagacaagctgcaggaattccagggattactccaactgaagaaaaagatggtaatcttccagatattgtgaatagtggaagtttgcatgagttcctggttaatttgcatgagagatatgggcctgtggtctccttctggtttggcaggcgcctcgtggttagtttgggcactgttgatgtactgaagcagcatatcaatcccaataagacattggacccttttgaaaccatgctgaagtcattattaaggtatcaatctggtggtggcagtgtgagtgaaaaccacatgaggaaaaaattgtatgaaaatggtgtgactgattctctgaagagtaactttgccctcctcctaaagctttcagaagaattattagataaatggctctcctacccagagacccagcacgtgcccctcagccagcatatgcttggttttgctatgaagtctgttacacagatggtaatgggtagtacatttgaagatgatcaggaagtcattcgcttccagaagaatcatggcacagtttggtctgagattggaaaaggctttctagatgggtcacttgataaaaacatgactcggaaaaaacaatatgaagatgccctcatgcaactggagtctgttttaaggaacatcataaaagaacgaaaaggaaggacttcagtcaacatattttcattgactccttagtacaagggaaccttaatgaccaacagatcctagaagacagtatgatattttctctggccagttgcataataactgcaaaattgtgtacctgggcaatctgttttttaaccacctctgaagaagttcaaaaaaaattatatgaagagataaaccaagtttttggaaatggtcctgttactccagagaaaattgagcagctcagatattgtcagcatgtgctttgtgaaactgttcgaactgccaaactgactccagtttctgcccagtttcaagatattgaaggaaaaattgaccgatttattattcctagagagaccctcgtcctttatgcccttggtgtggtacttcaggatcctaatacttggccatctccacacaagtttgatccagatcggtttgatgatgaattagtaatgaaaactttttcctcacttggattctcaggcacacaggagtgtccagagttgaggtttgcatatatggtgaccacagtacttcttagtgtattggtgaagagactgcacctactttctgtggagggacaggttattgaaacaaagtatgaactggtaacatcatcaagggaagaagcttggatcactgtctcaaagagatattaaaattttatacatttaaaatcattgttaaattgattgaggaaaacaaccatttaaaaaaaatctatgttgaatccttttataaaccagtatcactttgtaatataaacacctatttgtacttaattttgtaaatttggatttttatatatcatattttcttaattcattgtacacatttgacttactgcacagtatattgatcattttaatgggaaactttagctttctactttttatttttgktttttcactttctatgccattatttttgtattctttttcttagtgtgagctctaaaatcaatgttcttgaaaaagaaattattttgcagaagttggggaatcatgtttgttgaatatgtataaratagaaacataggctgggcgcggtggctcacacctgtaatccctacactttgggaggctgaggcaggtggatcacctgaggtccagagtttgagaccagtctggccaacatgatgaaaccccatctctactaaaaatacaaaacattggccgggagtggtggctcatgcctgtaatcccagcactttgggatgctgaggcgggtggatcacctgaggtcaggagtttgcgaccagcctggccaacatgatgaaaccctgtctctactaaaaatacaaaaaaattggctgggtgtggtggcccacacctgtaatcccagcactttgggaggtcgaggcgggtggatcacctgaggtccgaagttcgaggccagcctggccaacaggatgaaaccctgtctctattaaaaatacagaaaattggccgggtgcggtggctcacccctgtaatcccagtactttgggaggctgaggcgggtggagcacctgaggtcaggaattcgagatcagcctggccaacatggtgaaaccccatctctactgaaaaacacacacaaaaaaattagctgggcatggtggcacatgcctgtaatcccagctactcaggaggctgaggcaggagaatcatttgaacctgggaggcggagcttgcagtgagccgagattgcacccctgcactccagcctgggccacagagcaagactctgtctcaagaaaaacaaaaaaaan

SEQ ID NO: 1640 - DNA, 2549 bp, Homo sapiens
gcgtccgaggcgctgctgctggagcggccgatccgagacgtggctccctgggcggcagaaccatgttggacttcgcgatcttcgccgttaccttcttgctggcgttggtgggagccgtgctctacctctatccggcttccagacaagctgcaggaattccagggattactccaactgaagaaaaagatggtaatcttccagatattgtgaatagtggaagtttgcatgagttcctggttaatttgcatgagagatatgggcctgtggtctccttctggtttggcaggcgcctcgtggttagtttgggcactgttgatgtactgaagcagcatatcaatcccaataagacattggacccttttgaaaccatgctgaagtcattattaaggtatcaatctggtggtggcagtgtgagtgaaaaccacatgaggaaaaaattgtatgaaaatggtgtgactgattctctgaagagtaactttgccctcctcctaaagctttcagaagaattattagataaatggctctcctacccagagacccagcacgtgcccctcagccagcatatgcttggttttgctatgaagtctgttacacagatggtaatgggtagtacatttgaagatgatcaggaagtcattcgcttccagaagaatcatggcacagtttggtctgagattggaaaaggctttctagatgggtcacttgataaaaacatgactcggaaaaaacaatatgaagatgccctcatgcaactggagtctgttttaaggaacatcataaaagaacgaaaaggaaggaacttcagtcaacatattttcattgactccttagtacaagggaaccttaatgaccaacagatcctagaagacagtatgatattttctctggccagttgcataataactgcaaaattgtgtacctgggcaatctgttttttaaccacctctgaagaagttcaaaaaaaattatatgaagagataaaccaagtttttggaaatggtcctgtactcagagaaaattgagcagctcagatattgtcagcatgtgctttgtgaaactgttcgaactgccaaactgactccagtttctgcccagtttcaagatattgaaggaaaaattgaccgatttattattcctagagagaccctcgtcctttatgcccttggtgtggtacttcaggatcctaatacttggccatctccacacaagtttgatccagatcggtttgatgatgaattagtaatgaaaactttttcctcacttggattctcaggcacacaggagtgtccagagttgaggtttgcatatatggtgaccacagtacttcttagtgtattggtgaagagactgcacctactttctgtggagggacaggttattgaaacaaagtatgaactggtaacatcatcaagggaagaagcttggatcactgtctcaaagagatattaaaattttatacatttaaaatcattgttaaattgattgaggaaaacaaccatttaaaaaaaatctatgttgaatccttttataaaccagtatcactttgtaatataaacacctatttgtacttaattttgtaaatttggatttttatatatcatattttcttaattcattgtacacatttgacttactgcacagtatattgatcattttaatgggaaactttagctttctactttttatttttgttttttcactttctatgccattatttttgtattctttttcttagtgtgagctctaaaatcaatgttcttgaaaaagaaattattttgcagaagttggggaatcatgtttgttgaatatgtataaaatagaaacataggctgggcgcggtggctcacacctgtaatccctacactttgggaggctgaggcaggtggatcacctgaggtccagagtttgagaccagtctggccaacatgatgaaaccccatctctactaaaaatacaaaacattggccgggagtggtggctcatgcctgtaatcccagcactttgggatgctgaggcgggtggatcacctgaggtcaggagtttgcgaccagcctggccaacatgatgaaaccctgtctctactaaaaatacaaaaaaattggctgggtgtggtggcccacacctgtaatcccagcactttgggaggtcgaggcgggtggatcacctgaggtccgaagttcgaggccagcctggccaacaggatgaaaccctgtctctattaaaaatacagaaaattggccgggtgcggtggctcacccctgtaatcccagtactttgggaggctgaggcgggtggagcacctgaggtcaggaattcgagatcagcctggccaacatggtgaaaccccatctctactgaaaaacacacacaaaaaaattagctgggcatggtggcacatgcctgtaatcccagctactcaggaggctgaggcaggagaatcatttgaacctgggaggcggagcttgcagtgagccgagattgcacccctgcactccagcctgggccacagagcaagactctgtctcaagaaaaacaaaaaaaaaaaaaaa

SEQ ID NO: 1641 - DNA, 2551 bp, Homo sapiens; identical to SEQ ID NO: 315

SEQ ID NO: 1642 - DNA, 1746 bp, Homo sapiens
  misc_feature (1)..(2): n equals a,t,g, or c
  misc_feature (1593)..(1593): n equals a,t,g, or c
  misc_feature (1623)..(1623): n equals a,t,g, or c
  misc_feature (1656)..(1656): n equals a,t,g, or c
  misc_feature (1665)..(1665): n equals a,t,g, or c
  misc_feature (1709)..(1709): n equals a,t,g, or c
  misc_feature (1722)..(1722): n equals a,t,g, or c
  misc_feature (1727)..(1727): n equals a,t,g, or c
nngtrttcgccaagctctaatacgactcactatagggaaagctggtacgcctgcaggtaccggtccggaattcccgggtcgacccacgcgtccgacagcagagatctgtggagtaggattgtgggctggcagtgggtttatcccacagacctaagacagctacttaatttgtatagacccttcccagcctgggcctctgggttttccttctgggtggagatcatcttctgtaggaaatggaactgcttcaagccaagaagcttttacttttactaggtctttttgtgtcctgctgttcaaatattaggaagactgaaccctgtttcggtcttgacagtattacgtttcgtgatcccaaaaaaaagtgtttgtgtaacctcaagtcatgctgaaagtgaaatacagcttaaagtgggattctgctggacctgactcaacttttcacctcaccgcttggctccgtgcaggcagtatttgagtatgtggttccccctcaagtctgtaggagttgtattgtcaataaagtccaaggccagagtgcttgctttctagtaagtagagagaatttttgaaattcaacgacaaacatttattaagcccttattgtgtacagggctcaaagctaagtgctttgggtgattcagggtgattagggataggattccatcttcaagaagcctcccatctaggaagaaaggtcgataagcatagttttggacacatgggagagcatggctttctctgggcccagtaattactttggtatccagatcattagagaacggaatgccttctattgaactatgtaacagtcacaggtttagatcttctcaagttattattgcctttaatcttcatatgattcctatcctgcagttaggaaatggaaaccctaggatatagtgactgtgagctcagaaaattaggttgggagataagccagtagattgaggtggtagattcttcaagatcttgaaggggggaaggtggggggggggacgggggagctgtccccagctatatttgcccttggcagatgggatggattctgggagaaagctctaagaaattaggcctgtacgacttattttcatgaatctagctgctaagctggaataagtgaagttaaaagtagtgatgggccaggcacggtggctcacacctgtaatcccagttctttggaaggctgaggcaggcggatcatgaggtcaggagttccagaccagcctggtcagcatggtgaaaccccgtctctactaaaaatataaaaattagccaggcatagtggcacgtgcctgtaatcccagctactcaggaggctgaggcaggagaatcccttgaacctgggtggcaggggttgcagtgagctgagatcgtgccactgcactccagcctgggtgacagaatgagactccgtcttaaaaaaaaaaaaaaagggcggccgctctagaggatccaagcttacgtacgcgtgcatgcgacgtcatagctcttctatagtgtcacctaaattcaattcactggccgtcgttttacaacgtcgtgactgggaaaaccctggcgttacccaacttaatcgccttgcagcacatncccctttcgccagctggcgtaatagcgaanaaggccccgcaccgatcggcctttccaacaagnttgcgcaancctggaatggcgaaatggggaccccgcccttgtaaccggggcanttaaaccgccggncgggntggtgggggggttaacccc

SEQ ID NO: 1643 - DNA, 1572 bp, Homo sapiens
ggtcgactttttttttttttttttttttttttttttttttttttttttttttttgacgctcacacttagtttttattagccacagtttcccacagttttctacctcctaggaaatacacagctcaccaagggcacccagtcaccattctgtcctgcttgcatggctgacactgttgctcaccgagggtgagcagatctgcaaagtcacccagggcctggtttcctcaggtacagagaaccccaaagaaagaagagccagaacttagagcccctttcttctccatatgggataggacacccaagacaaatgacccatgcatcatgaaacagaggcagggccctaagctgcccaagaggcctgggcacttggagttcctgccaacagccaggccactgaaccattgcctgtccaccctcccacagtggctaatccctggcctagttgtaaatgtcttttcagcgctgcacacttaatgcagtcggatgccttctgattactggtctctgagaccttcagctgctgaggtgcaagaatcaagcatgggcatgaaaggcaaagggctaccacagcagcatcgttctgcctccaccctgggctacgcgacccagcccagcaggctgtgacctaggagagctgctccagcctggggcatgaggggccctagagcaggatgccggggctaggagtggactgccctgctgatgggtcgtttttctgtgaagaagcttttcaacagtagcacctgactgaagctgaccacgaacagggcaatcgtctcgccaacagaccagtaagagactcggctattaaggtcttccgctcgggcccggtcctgggcctcccgcagccggtaatgcgtctgggagtcaatcaccgttttcagagcctcatggatggtcacgcaggcggactccatctgggtgagagctgtgaccctgttccccatgtctgggagaatgggaggctcatcgcccacttgaaagtcaaagtagacggtcttgtgagagaaggtggaaaactcattactgaagcaaaactgataaacgcccttgacttcagcccggtacgtgaagctgtcgtactgcttcttcgtttctctgtagatggtgttcccctgggggtcctctacatagcagtcaacatcgtagtggcctccagtgatgacctggtaatccagggagaacttcacgccctgctccacctcctcgtggaagcactgcttggcgttgtccggcagctcgaaggtgagctcggccccgcagggctgctcggcccggcgcaggagcagcagcagaagcagcacggaggcggagcgcgggacagtgctgcccatgatgctctcggtcccgtctcgagggccgcggctcgggcgctgcgcccccggcgggctggggcgacgactaccgaccgggtcytaggaggatgtaaggggataaacgtggcaccagcggagctcctcgtgccgaattcctrcagcccgggggatccactagttctagagcggccgccaccgcggtggagctccagcttttgttccctttagtgagggttaatttcgaactggcgtcaaa

SEQ ID NO: 1644 - DNA, 4049 bp, Homo sapiens
gggctcagtcctcacagtctgttcatgatcataatcagccataccacatttgtagaggttttacttgctttaaaaaacctcccacacctccccctgaacctgaaacataaaatgaatgcaattgttgttgttaacttgtttattgcagcttataatggttacaaataaagcaatagcatcacaaatttcacaaataaagcatttttttcactgcattctagttgtggtttgtccaaactcatcaatgtatcttatcatgtctggatcgatcctgcattaatgaatcggccaacgcgcggggagaggcggtttgcgtattggctggcgtaatagcgaagaggcccgcaccgatcgcccttcccaacagttgcgcagcctgaatggcgaatgggacgcgccctgtagcggcgcattaagcgcggcgggtgtggtggttacgcgcagcgtgaccgctacacttgccagcgccctagcgcccgctcctttcgctttcttcccttcctttctcgccacgttcgccggctttccccgtcaagctctaaatcgggggctccctttagggttccgatttagtgctttacggcacctcgaccccaaaaaacttgattagggtgatggttcacgtagtgggccatcgccctgatagacggtttttcgccctttgacgttggagtccacgttcttaatagtggactcttgttccaaactggaacaacactcaaccctatctcggtctattcttttgatttataagggattttgccgatttcggcctattggttaaaaaatgagctgatttaacaaaaatttaacgcgaattttaacaaaatattaacgcttacaatttaggtggcacttttcggggaaatgtgcgcggaacccctatttgtttatttttctaaatacattcaaatatgtatccgctcatgccaggtcttggactggtgagaacggcttgctcggcagcttcgatgtgtgctggagggagaataaaggtctaagatgtgcgatagagggaagtcgcattgaattatgtgctgtgtagggatcgctggtatcaaatatgtgtgcccacccctggcatgagacaataaccctgataaatgcttcaataatattgaaaaaggaagagtatgagtattcaacatttccgtgtcgcccttattcccttttttgcggcattttgccttcctgtttttgctcacccagaaacgctggtgaaagtaaaagatgctgaagatcagttgggtgcacgagtgggttacatcgaactggatctcaacagcggtaagatccttgagagttttcgccccgaagaacgttttccaatgatgagcacttttaaagttctgctatgtggcgcggtattatcccgtattgacgccgggcaagagcaactcggtcgccgcatacactattctcagaatgacttggttgagtactcaccagtcacagaaaagcatcttacggatggcatgacagtaagagaattatgcagtgctgccataaccatgagtgataacactgcggccaacttacttctgacaacgatcggaggaccgaaggagctaaccgcttttttgcacaacatgggggatcatgtaactcgccttgatcgttgggaaccggagctgaatgaagccataccaaacgacgagcgtgacaccacgatgcctgtagcaatggcaacaacgttgcgcaaactattaactggcgaactacttactctagcttcccggcaacaattaatagactggatggaggcggataaagttgcaggaccacttctgcgctcggcccttccggctggctggtttattgctgataaatctggagccggtgagcgtgggtctcgcggtatcattgcagcactggggccagatggtaagccctcccgtatcgtagttatctacacgacggggagtcaggcaactatggatgaacgaaatagacagatcgctgagataggtgcctcactgattaagcattggtaactgtcagaccaagtttactcatatatactttagattgatttaaaacttcatttttaatttaaaaggatctaggtgaagatcctttttgataatctcatgccataacttcgtataatgtatgctatacgaagttatggcatgaccaaaatcccttaacgtgagttttcgttccactgagcgtcagaccccgtagaaaagatcaaaggatcttcttgagatcctttttttctgcgcgtaatctgctgcttgcaaacaaaaaaaccaccgctaccagcggtggtttgtttgccggatcaagagctaccaactctttttccgaaggtaactggcttcagcagagcgcagataccaaatactgttcttctagtgtagccgtagttaggccaccacttcaagaactctgtagcaccgcctacatacctcgctctgctaatcctgttaccagtggctgctgccagtggcgataagtcgtgtcttaccgggttggactcaagacgatagttaccggataaggcgcagcggtcgggctgaacggggggttcgtgcacacagcccagcttggagcgaacgacctacaccgaactgagatacctacagcgtgagctatgagaaagcgccacgcttcccgaagggagaaaggcggacaggtatccggtaagcggcagggtcggaacaggagagcgcacgagggagcttccagggggaaacgcctggtatctttatagtcctgtcgggtttcgccacctctgacttgagcgtcgatttttgtgatgctcgtcaggggggcggagcctatggaaaaacgccagcaacgcggcctttttacggttcctggccttttgctggccttttgctcacatgttctttcctgcgttatcccctgattctgtggataaccgtattaccgcctttgagtgagctgataccgctcgccgcagccgaacgaccgagcgcagcgagtcagtgagcgaggaagcggaagagcgcccaatacgcaaaccgcctctccccgcgcgttggccgattcattaatgcagagcttgcaattcgcgctttttcaatattattgaagcatttatcagggttattgtctcatgagcggatacatatttgaatgtatttagaaaaataaacaaataggggttccgcgcacatttccccgaaaagtgccacctgacgtctaagaaaccattattatcatgacattaacctataaaaataggcgtatcacgaggccctttcactcattaggcaccccaggctttacactttatgcttccggctcgtataatgtgtggaattgtgagcggataacaatttcacacaggaaacagcatcgtgcaggtcgttacataacttacggtaaatggcccgcctggctgaccgcccaacgacccccgcccattgacgtcaataatgacgtatgttcccatagtaacgccaatagggactttccattgacgtcaatgggtggagtatttacggtaaactgcccacttggcagtacatcaagtgtatcatatgccaagtacgccccctattgacgtcaatgacggtaaatggcccgcctggcattatgcccagtacatgaccttatgggactttcctacttggcagtacatctacgtattagtcatcgctattaccatggtgatgcggttttggcagtacatcaatgggcgtggatagcggtttgactcacggggatttccaagtctccaccccattgacgtcaatgggagtttgttttggcaccaaaatcaacgggactttccaaaatgtcgtaacaactccgccccattgacgcaaatgggcggtaggcgtgtacggtgggaggtctatataagcagagctcgtttagtgaaccgtcagatcgcctggagacgccatccacgctgttttgacctccatagaagacaccgggaccgatccagcctccggactctagcctaggccgcgggacggataacaatttcacacaggaaacagctatgaccactaggcttttgcaaaaagctatttaggtgacactatagaaggtacgcctgcaggtac

SEQ ID NO: 1645 - DNA, 1765 bp, Homo sapiens
  misc_feature (1764)..(1764): n equals a,t,g, or c
caatttcacacaggaaacagctatgaccatgattacgccaagctcgaaattaaccctcactaaagggaacaaaagctggagctccaccgcggtggcggccgctctagaactagtggatcccccgggtcactttaccagtgtagacgcggcccacttcgatttctgcagtgatctcttcgatacgacgaatagcatgtttcgctttctcgccgtcggtcgctgcaatcttcacagtaccgtcatcttcgatttcgatggtggtgccagtttcttcggtcagagcacggattacagaaccgcctttaccgataacatctttgatcttgtccgggttgatcttgatggtatggatacgcggtgcgaactcagagatatcgccacgcggcgcgttgatcgcctgttccattacgcccaggatatgcagacgcgcacctttagcctggttcagcgcaacctgcatgatctctttggtgataccttcaatkttgatatccatctgcagtgcagagataccgtcgcgggaacctgcaactttgaagtccatatcgcccaggtgatcttcgtcgcccaaaatgtcagacagtacaacgtagttgtcgccttctttaccagacccattgcgatacccgcaacggcagctttgatcggcacacctgcgtccatcagcgccagagacgcgccgsacacggaagccatagaagaggaaccgttggattcagtgatttcagacacaacacgtacggtgtacgggaatttgtccatatccggcatgactgccagcacgccgcgcttcgccagacgaccgtgaccaatttcacgacgcttcggagaaccgaccatgccggtttcgcctacggagtacggagggaagttgtagtggaacaggawgktwtckktacgttcgcccatcagttcatcaagaacctgcgcgtcacgagcagtacccagcgttgcggtaaccagcgcctgcgtttcaccacgggtgaacagcgcagaaccgtgagtacgcggcagcacgccagtacgcacatccagaccacggatcatatctttttcacgaccgtcgatacgcggttcgcctgccagtacgcggctacgaacaacgtttttctcgatcgcgtgcagaatttcacccagttcgttttcgtccagggtttcgtcttcagcaagcagcgtcgcgatggtttcagatttgatgacatcaacctgcgcataacgctcttgtttgtcggtgatgcggtaagcatcgctaaggcgagcttcagccagtgcagcaacgcgcgcgtttagcgcttcgtttamcggctccggctgccagtcccaacgcggtttaccggcttctttcaccagttcattgatgttctgaataacaacctgctgttgttcatgaccgaacactactgcgcccagcatctggtcttcgctcagcagttgagcttcagattcaaccatcagtacagcggcttcagtaccggcaacaaccagatccagtttgctctctttcagctcgtcctgagtcgggttcagtacgtactggtcattgatgtaacctacgcgggcagcaccaatcgggccattgaacggaataccagacagagacagcgctgcggaagcaccaatcatcgcgacgatatccgggttaacttgcgggttaacagaaaccacggtggcgataacctgaacttcgttgacgaagccttccggggaacagcgggcgaatcgggcatgtgcatccaacttttgctgcttcgagaaagccattcnt

SEQ ID NO: 1646 - DNA, 1124 bp, Homo sapiens
gccgaaagtaaggaaaggtcggttggtttgcactggcggacaaatggtccaattaccgcggaaaagggacctctgaatccagattggcgtcctctctacctatarggtaggctcaggggcggtgakaaccagcccskgatgtgggcgcggcactgaggtagaactgagagatcctctaccgcagtcgtttgaggaggcggaactgaagttttttcttaattatcatgtgacgggttctggatttaatggggggaaaagggcggaaaaggacaaggatccaaactggcgaatttgctgatcttcgcgtccctctccgctttccggccggcagcgctgccagggtatatttccttttttccgatcctgcaacagcctctttaaactgtttaaatgagaatgtccttggctcagagagtactactcacctggcttttcacactactcttcttgatcatgttggtgttgaaactggatgagaaagcaccttggaactggttcctcatattyattccagtctggatatttgatactatccttcttgtcctgctgattgtgaaaatggctgggcggtgtaagtctggctttgaccctcgacatggatcacacaatattaaaaaaaaagcctggtacctcattgcaatgttacttaaattagccttctgcctcgcactctgtgctaaactggaacagtttactaccatgaatctatcctatgtcttcattcctttatgggccttgctggctggggctttaacagaactcggatataatgtcttttttgtgagagactgacttctaagtacatcatctcctttctattgctgttcaacaagttaccattaaagtgttctgaatctgtcaagcttcaagaataccagagaactgagggaaaataccaaatgtagttttatactacttccataaaacaggattggtgaatcacggacttctagtcaacctacagcttaattattcagcatttgagttattgagatccttattatctctatgtaaataaagtttgttttggacctcaaaaaaaaaaaaaaaaaaaaaaaaaaaaaaaaaaaaaaaaaaaaaaaaaaaaaaaaaaaaaaaaaccggggggggggccccccccccaa

SEQ ID NO: 1647 - DNA, 1550 bp, Homo sapiens
  misc_feature (1549)..(1550): n equals a,t,g, or c
aaggcataaccggctcacgacaggacatgtgaacctggcagcaatgggaaatcatctggagcatgtggattcatgagatatcgtgtgtggattcatgaggttgcaaacaccaagaaagaaaccgttttcaaatggctcaaggatgatgttctgtatgaaacggagacactgcctaacctggagaggggaatctgtgagctcctcatcccaaagttgtcaaagaaggaccacggtgaatacaaggcaaccttgaaagatgacagaggccaagatgtgtccatccttgaaatagctggcaaagtgtatgatgatatgattttggcaatgagtagagtctgtsggaaatctgcttcgccactsaaggtactctgcaccccagaaggaatacgacttcagtgtttcatgaagtattttacagacgaaatgaaagtgamctsgtgtcacamagatgctaagatctcatccagtgagcatatgagaatcggggggagtkaagagatggcttggctgcagatatgtgagccgactgagaaggataaaggaaaatacacttttgagattttcgatggcaaagacaaccatcaacgctcccttgacctgtccggacaagcttttgatgaagcatttgcagaattccagcaattcaaagctgctgcttttgcagagaagaatcgtggcaggttgatcggcggcttgcctgacgtggtgaccatcatggaagggaagaccttgaatctgacctgcacggtgtttggaaaccctgaccccgaagtgatttggttcaagaacgaccaggacatccagctcagcgagcacttctcggtgaaggtggagcaggccaagtacgtcagcatgaccatcaaaggcgtgacctccgaggactcgggcaagtacagcatcaacatcaagaataagtatggcggggagaagatcgacgtgacrgtgagcgtgtacaaacacggggagaagatcccggacatggccccgcccagcaagccaagcccaagctcatccccgcgtctgcctcagcggcaggccagtgaaggcgttttcctagcctggagatgggaaaatatgcttggcagagacaggaatgctgtgtgcttgttccaaatgagcagctggcatccgagtggtgtcctgtgtgggctgatagttgatcacacattgtgcttttgatttttgcatttggtgatgaatattttatacccgtctaagggagaaagctaatgttttccacaagactgaacaacgtgtatttacacgagggtagacggcagatgcctgacagagagtgggttggcagacaacacactagcattttcacgggtgtgggcacatgggtgtggcacctggacgtgtgcagcatgtggcggtctgtgtgaagccaccgtgcttctctttggggggccgcgagatctagcatctctgaaatcctggctgtcgaggctttgaagcatgtgttacctggttaagcttgttttctcttgctttaggcaaataaaagtttaaaaatcaaaaaaaaaaaaaaaaaaaaaaaaaaaaaaann

SEQ ID NO: 1648 - DNA, 1265 bp, Homo sapiens
  misc_feature (2)..(2): n equals a,t,g, or c
  misc_feature (25)..(25): n equals a,t,g, or c
  misc_feature (1264)..(1264): n equals a,t,g, or c
anttgcggaacaggcctcgtgcgtngtattgatgttagtgattgtcaaaataggtttatcatttaaaaaactaggaaattactaagtataaagaagaaaaaccagtattaattaagtgatgagacctgttcattttgttttccctgacttatttccattaccaaacatagtaaaggccagaaaagattaaaaaaaaaattaacacagccattccattgttttttaccacatggagaaaggaccaggctggaagcatatgtccccccacccttatttatattcctttgagcattgccgttttctagacagacaatccgaaaataattgtgttgataggtctgtttaagcctgaactctgggtgtaaaatgttatccagaagctatagggagctgccttgctcaggtcattggaaatttcaaccctaagactcattggaatttctaagtccgttatgcaccattatgggcatatggagcatattcataccatgaggaggagtctttgtttatgatggactttttaatatggccataattaaactcacactcaaaaaggatgagctattgtcaaaagccaaaagaaaaacagacaaaatgaacatgaagcaaggagtccataaaacaagagttctttaccacgtttaagcaaatgtctctcaaaaaaaattgtatttctgtgcacattagctgagattcacacattttgcacctcagtagtatttcagatgagactcaatgtgtggagaaaactgctaacttgtttggttctactcttaccccctcttctgtggcaatgtggggtcagggccgtatcctaaagtatccacatggtcttaaatggaaatcatgggactctggaaagctggcatgagctggttggagcttttaaacagaagtgctttatgggtatcagatctcttctgacatcaattgtttcaaatcattgttgggctctgtcgtgttctgcaatcttccccattcccctcatgatctctggcttatcttttatccaatctgtatggactttttaggattttttttttcttatagtacaaataattttcagatcccagctttggtaaatgtgttaattctactttgtgaataaataaatgagtgatctgctaaaaatggcaattgtagaattatgttgtatgtaatgtacatatggagaaagaatgtattttgttcattttcttaataaaatgttatatatggatgctaaaaaaaaaaaaaaaaaaaaaaaaaaaaaaaaaaaaaaatnt

SEQ ID NO: 1649 - DNA, 809 bp, Homo sapiens
tgggatcttgtctcactacagccttgacatgtgggttcgagcaatcctcccacctcagcctcccaaagtgctgaggcgtgagaggattgcagacacgagccactgcacctcgccagcttttaattttatktcctgtggtgcagtgcagatggtttgagcggaaacagtgctgatggggatcatctctttcctgaccacctaccccttcttggcccttgggaacaaccattccctgcagtgggaggtgcccttagtcttacagcctccacctgatttgcctgattggcttccattctcagagggggcagcctaggcagaggcctgacggggccaaaagtgtgtttcatatgagaaatgtgaacagcctttcagccatcaatccggtgtctctccttctcatgcatagatctcgggctctgaaaagggcagtttttctcctaactttgccattctcctgccttcctggcttatgtctcagtcatagtcccattcaacgtcaagaagtggagaagggctgggcacggtggctcaagcctgtcatcccagcactttgggaggacgaggtgggtggatcacctgaggtcaggagttcgagaccaacctggccaacgtggtgaaaccccatctctgctaaaaatacaaaaaattagccgggagtgatggcatgcacctgtaagcccagcacwcggmggctgaggcaggagaatcgcttgaacccaggaggcagaggttgtggtgaacggagaccacaccattgcactccagcttgggtaacagagcaagacttggtctcaaaaaaaaaaaaaaag

SEQ ID NO: 1650 - DNA, 1959 bp, Homo sapiens
  misc_feature (1935)..(1936): n equals a,t,g, or c
ggaccaagtcaagaatggcaccaatatgaagtccctgaatctggagatgcaagagttggcggtagctgcgtccctgtcacagactggggcgtccattggcagtgccctggctgcaatcatgcttctacttctggtgtttttggtggcttgttttatcaacaggaaatgccagaaacagaggaagaagaagcccgcagaggacattttggaagaatatcctctgaataccaaggtagaagtgcccaagaggcacccggaccgggtggagaagaacgtgaatagacactactgcactgtgcggaacgtcaacatcctgagtgagcctgaggcggcttacacgttcaaaggtgctaaagtcaaaagactgaatctagaagtcagagttcacaacaatttacaagatggaacagaagtttaatggaggagacctatgtgtatttttttctaaaaacatttttataaaatggggggaaacactggtatttttataatctcgcagataaaaaagggaaaacaattatcttctctacttggattatgagataaccttttcttggaggaaagaaacaccgctttacaaaggcatgactctggcggtggtcctaaggaagcatgagcagaaaattcataaaaatgtatcatcagcaggagatgagactatgaattggcatccagaacaggagatttagagcaaaatctaatttagcattctgagatgagtgtcaggttttcaggagagaatgagttggggtgagcccagagtctgaaactcctgactggtcaggtgctacttaagaccagcttgggcaattcagggcagaactcctgtatcagcctcatggacacccagaattggtatctcatggctggagagctgatcagccaggcacagaatctccagaacaacctagagagtgaatgctaatttgtagagcgaatttccatttggcccattatttgtaactgtgtaactgctccaagtgccagaatgcttacacgttaaagcagcacctttccatttgcccacatattcttcttgcacaccccttccattactgctgaataggacattgcatgggaagagtacagaggtggcagaatgaagctagagtgggaaggactaaagactgagccccagagtgctcccagcaaccgccacgtacaaggtctgaaatgacaagggcaagagtgagataggaaactgtgtgtgaaaggaaagcccttgcagtatttctgcctccctttctttctgcctttcaccccactaaatgtacgttattgaatgccagtacttctctagtggatgcacacttgttaaatagtgttaagagatgtggagatgagatatacccctttgatgtagaattattcatttggtttgtttcatacttcattataggaatcaagtaatttgatgactaatgtggattatatttcagtcaaagctctgctttcaatttctctgatttgctcactaatgccttatgtgtgttttactaaccttttatatcttgccttcaagtgagaaggaacaaacaactctcagtggttactacttgcttttatatgctggctgtgaaggttaaaagaaagaatggtctgtaccattttttctgctttgctgcccttttattgtaccccaggcctcctagaggactcctgcagattctattgttgggtgggaaatagtgttggaatgtgtttgcacagtcttatgatattcagtctcagtctgctataggtatttgttattcttggatactacacacctgctcagactgagtaaacatttgtggtgctgtcaacctgatttcttgactctcaaatgatttttgtatttccaatatgaatttgtgtgttatgaatttctgatttctccaatagtatatgccactatataaatttgtattaataaatgacagtcttgttggtttnnaaaaaaaaaaaaaaaaaactcga

SEQ ID NO: 1651 - DNA, 1622 bp, Homo sapiens; identical to SEQ ID NO: 323

SEQ ID NO: 1652 - DNA, 498 bp, Homo sapiens
  misc_feature (496)..(496): n equals a,t,g, or c
taaaaactggaacggtgaaggtgacagcagtcggttggagcgagcatcccccaaagttcacaatgtggccgaggactttgattgcacattgttgtttttttaatagtcattccaaatatgagatgcgttgttacaggaagtcccttgccatcctaaaagccaccccacttctctctaaggagaatggcccagtcctctcccaagtccacacaggggaggtgatagcattgctttcgtgtaaattatgtaatgcaaaatttttttaatcttcgccttaatacttttttattttgttttattttgaatgatgagccttcgtgcccccccttcccccttttttgtcccccaacttgagatgtatgaaggcttttggtctccctgggagtgggtggaggcagccagggcttacctgtacactgacttgagaccagttgaataaaagtgcacaccttaaaaaaaaaaaaaaaaaacttgrgggggggcccggtacccaatngg

SEQ ID NO: 1653 - DNA, 1622 bp, Homo sapiens
ggcacgaggcgtgatggtgggcatgggtcagaaggattcctatgtgggcgacgaggcccagagcaagagaggcatcctcaccctgaagtaccccatcgagcacggcatcgtcaccaactgggacgacatggagaaaatctggcaccacaccttctacaatgagctgcgtgtggctcccgaggagcaccccgtgctgctgaaccgaggcccccctgaaccccaaggccaaccgcgagaagatgacccagatcatgtttgagaccttcaacaccccagccatgtacgttgctatccaggctgtgctatccctgtacgcctctggccgtaccactggcatcgtgatggactccggtgacggggtcacccacactgtgcccatctacgaggggtatgccctcccccatgccatcctgcgtctggacctggctgccgggacctgactgactacctcatgaagatcctcaccgagcgcggctacagcttcaccaccacggccgagcgggaaatcgtgcgtgacattaaggagaagctgtgctacgtcgccctggacttcgagcaagagatggccacggctgcttccagctcctccctggagaagagctacgagctgcctgacggccaggtcatcaccattggcaatgagcggttccgctgccctgaggcactcttccagccttccttcctgggcatggagtcctgtggcatccacgaaactaccttcaactccatcatgaagtgtgacgtggacatccgcaaagacctgtacgccaacacagtgctgtctggcggcaccaccatgtaccctggcattgccgacaggatgcagaaggagatcactgccctggcacccagcacaatgaagatcaagatcattgctcctcctgagcgcaagtactccgtgtggatcggcggctccatcctggcctcgctgtccaccttccagcagatgtggatcagcaagcaggagtatgacgagtccggcccctccatcgtccaccgcaaatgcttctaggcggactatgacttagttgcgttacaccctttcttgacaaaacctaacttgcgcagaaaacaagatgagattggcatggctttatttgttttttttgttttgttttggttttttttttttttttggcttgactcaggatttaaaaactggaacggtgaaggtgacagcagtcggttggagcgagcatcccccaaagttcacaatgtggccgaggactttgattgcacattgttgtttttttaatagtcattccaaatatgagatgcgttgttacaggaagtcccttgccatcctaaaagccaccccacttctctctaaggagaatggcccagtcctctcccaagtccacacaggggaggtgatagcattgctttcgtgtaaattatgtaatgcaaaatttttttaatcttcgccttaatacttttttattttgttttattttgaatgatgaggcttcgtgcccccccttcccccttttttgtcccccaacttgagatgtatgaaggcttttggtctccctgggagtgggtggaggcagccagggcttacctgtacactgacttgagaccagttgaataaaagtgcacaccttaaaaaaaaaaaaaaaaaa

SEQ ID NO: 1654 - DNA, 1207 bp, Homo sapiens
  misc_feature (1206)..(1206): n equals a,t,g, or c
ggaagcacagagattccccgccgcgttccctggactcaggagctcgccgcgatgccccgccccactctccacccgctgaatgcagggcgcatgctgctacttggcggctcaagccccgcccgcaccgtccccattctctgaccgcccctctcccggtacactgcgcaggcacaacagagccgctcccctctcctcgccccgccaccgggacggagagcgcccgccgctgcatttccggcgacacctcgcagtcattcctgcggcttgcgcgcccttgtcgacagccggggccttcgtgagaccgcttgttttctgcaggtgcaggcctggggtagtctcctgtctggacagagaagagaaaaatgcaggacactggctcagtagtgcctttgcattggtttggctttggctacgcagcactggttgcttctggtgggatcattggctatgtaaaagcaggcagcgtgccgtccctggctgcagggctgctctttggcagtctagccggcctgggtgcttaccagctgtctcaggatccaaggaacgtttgggttttcctagctacatctggtaccttggctggcattatgggaatgaggttctaccactctggaaaattcatgcctgcaggtttaattgcaggtgccagtttgctgatggtcgccaaagttggagttagtatgttcaacagaccccattagcagaagtcatgttccagcttagactgatgaagaattaaaaatctgcatcttccactattttcaatatattaagagaaataagtgcagcatttttgcatctgacattttacctaaaaaaaaagacaccaaacttggcagagaggtggaaaatcagtcatgattacaaacctacagaggtggcgagtatgtaacacaagagcttaataagaccctcatagagcttgattcttgtatattgatgttgtcttttctttctgtatctgtaggtaaatctcaagggtaaaatgttaggtgtcagctttcagggctctgaaacccyattccctgctctgaggaacagtgtgaaaaaaagtcttttaggagatttacaatatctgttcttttgctcatcttagaccacagactgactttgaaattatgttaagtgaaatatcaatgaaaataaagtttactataaataataaaaaaaaaaaaaaaaaaaataaaagaaaaaaaacaaaacaana

SEQ ID NO: 1655 - DNA, 986 bp, Homo sapiens; identical to SEQ ID NO: 324

SEQ ID NO: 1656 - DNA, 845 bp, Homo sapiens
  misc_feature (838)..(838): n equals a,t,g, or c
cattaaacccaggccccamaaaatttawgtctgctggctgactggaagcaaaaaagtcaagatggaatatgatgaattccaacacaatggggcaccaaggcctttaggcctctctttttattttgctttggttttgtttgtttttctttagagacatgctctttctcatgggacttgaagtggactcatctttgtgcagtgctggttttgccatactcatttcaagtattatagacatatgtaatggtgaaaatatatgaactgtggcctttttcattcttgttacttgtgatgcaattaagtgaagataagaaaaaaaaaaaaaaagcagagatttaccatgtatcagtgcctggctttttgttataaagctttgtttgtctagtgctcttttgctataaaatagactgtagtacaccctagtaggaaaaaaaaaaaactaaatttaaaaataaaaaatatatttggcttatttttcgcaggagcaatccttttataccatgaatattacaaaaaaattgtcagattctgaatatttcttctttgtagatttttggaatcattatgagtaaaagtttgttactttattttactatttaaaagatgttattttaccatgtgttaccaagatgaaactgtatgggtagcttttttgtttgttttttgttttgtttttgtttttgtttttgtttttagttgtaggtcgcagcggggaaattttttgcgactgtacacatagctgcagcattaaaaacttaaaaaaattgttaaaaaaagaaaaaaagggaaaacatttcaaaaaaaaaaaaaaaaaactcgagggggggcccggtacgcnattcgcc

SEQ ID NO: 1657 - DNA, 397 bp, Homo sapiens
ggcacgagaaaaaaactaaatttaaaaaaaaaaaatatatttggcttatttttcgcaggagcaatccttttataccatgaatattacaaaaaaattgtcagattctgaatatttcttctttgtagatttttggaatcattatgagtaaaagtttgttactttattttactatttaaaagatgttattttaccatgtgttaccaagatgaaactgtatgggtagcttttttgtttgttttttgttttgtttttgtttttgtttttgtttttagttgtaggtggcagcggggaaattttttgcgactgtacacatagctgcagcatttaaaaacttaaaaaaaattgttaaaaaaagaaaaaaagggaaaaccatttcaaaaaaaaaaaaaaaaaaaaa

SEQ ID NO: 1658 - DNA, 2032 bp, Homo sapiens; identical to SEQ ID NO: 275

SEQ ID NO: 1659 - DNA, 2010 bp, Homo sapiens
ctgcaggattcggcacgagggcaagcccgcgagcgcgagaaatccaacgcctgcaagtgtgtcagcagccccagcaaaggcaagaccagctgcgacaaaaacaagttaaatgtcttttcccgggtcaaactcttcggctccaagaagaggcgcagaagaagaccagagcctcagcttaagggtatagttaccaagctatacagccgacaaggctaccacttgcagctgcaggcggatggaaccattgatggcaccaaagatgaggacagcacttacactctgtttaacctcatccctgtgggtctgcgagtggtggctatccaaggagttcaaaccaagctgtacttggcaatgaacagtgagggatacttgtacacctcggaacttttcacacctgagtgcaaattcaaagaatcagtgtttgaaaattattatgtgacatattcatcaatgatataccgtcagcagcagtcaggccgagggtggtatctgggtctgaacaaagaaggagagatcatgaaaggcaaccatgtgaagaagaacaagcctgcagctcattttctgcctaaaccactgaaagtggccatgtacaaggagccatcactgcacgatctcacggagttctcccgatctggaagcgggaccccaaccaagagcagaagtgtctctggcgtgctgaacggaggcaaatccatgagccacaatgaatcaacgtagccagtgagggcaaaagaagggctctgtaacagaaccttacctccaggtgctgttgaattcttctagcagtccttcacccaaaagttcaaatttgtcagtgacatttaccaaacaaacaggcagagttcactattctatctgccattagaccttcttatcatccatactaaagccccattatttagattgagcttgtgcataagaatgccaagcattttagtgaactaaatctgagagaaggactgccaaattttctcatgatctcacctatactttggggatgataatccaaaagtatttcacagcactaatgctgatcaaaatttgctctcccaccaagaaaatgtaaaagaccacaattgttcttcaaaaacaaacaaaacaaaacaaaacaaaattaactgcttaaatgttttgtcggggcaaacaaaattatgtgaattgtgttgttttcttggcttgatgttttctatctacgcttgattcacatgtactcttttctttggcatagtgcactttatgatttctgaaattcaatggttctattgactttttgcgtcacttaatccaaatcaaccaaattcagggttgaatctgaattggcttctcaggctcaaggtaacagtgttcttgtggtttgaccaattgtttttctttctttttttttttttttagatttgtggtattctggtcaagttattgtgctgtactttgtgcgtaraaattgagttgtattgtcaaccccagtcagtaaagagaacttcaaaaaattatcctcaagtgtagatttctcttaattccatttgtgtatcatgttaaactattgttgtggcttcttgtgtaaagacaggaactgtggaactgtgatgttgtcttttgtgttgttaaaataagaaatgtcttatctgtatatgtatgagtcttcctgtcattgtatttggcacatgaatattgtgtacaaggaattgttaagactggttttccctcaacaacatatattatacttgctactggaaaagtgtttaagacttagctaggtttccatttagatcttcatatctgttgcatggaagaaagttgggttcttggcatagagttgcatgatatgtaagattttgtgcattcataattgttaaaaatctgtgttccaaaagtggacatagcatgtacaggcagttttctgtcctgtgcacaaaaagtttaaaaaagttgtttaatatttgttgttgtatacccaaatacgcaccgaataaactctttatattcattcaaagaawawaaaaaaaaaaaaaa

SEQ ID NO: 1660 - DNA, 1522 bp, Homo sapiens
gactttttgctccaagtgccagaattgattgtggttaggacatcttacgctgagaaayctawttctaatgcagctccctcaaaggaascttttaagatgcgcagcctcaggaaaggtaaggaccgaacagtggctgaaggtgaggaatgtgccagggagatgggtgtggacatcattgccaggagcgagtctctgggccccatcagtgagctctactctgatgagctcagtgaaccagaacacgargcagccaggccggtgtatcctccccatgaaggaagrgaaatccccacccccgarcctttaaaagttacttttaaatctcaggtgaaagtagaggatgatgaatctcttttgttagatttaaagcactcatcgtaaagaggaattaagtatatcctaaatatgaatctcctaatcatgcagttttagtttgaatagtgtagtcgtctacatttctgtgccatgtaggaaaacataaatgtattttttttcttatatttaaaatcttgaagataatataaatattattatcactctttctcatggcagctgtggattttttagttcctttctcttgtccaccagaaaaatagtttcctaggttgggccagttacgtgtttggtaagggcaactttgcggccgtcatttgcaggagaactctaaatattggttaggattaatattgtggccagcctcmaaggggaataactcatgtgtgggttatatcgtccagatgttcagatcaacagatttgttagtaaattagcagtcacaccccttttttgatgctttcacattaaaaaattgaagttttggacttgagcatttggctctagtatcatagctttacttataagaaaaccctgggcaagtcatctgcttattctcatcagtaaaaatggagagggttggcctctgctgcctgcctcagaggactgttgtgatgatcaaaggaaatggtacacattctgggggaacaagaagcacacccagagaaaacaagcctcatcagttcctccaaaacagaatggaaacgagttacaccttctgaaaaagccctcagcaccaatcaataaggtcctaggttggagagaaactaaagctggtcttcagaagccttttcacagaatcaagagtgaaaaataagtaaatgtttgggtgaccactttttcatcagacttaactatatcttgggttttagttgggtctcaaaatgttccccagccagaccctttctaatttccttttgattaagatctttggtggactatagcactaaatttgtttaagcagtatgaggcataaaattgtgactatgtttctaaagtcggccctgatgcattgggtttggaaatgaccacaaatattcctgttttcctgagtgtaccttcagggtccagctgtccaaaacagtgttgataggagttcatcatagctgctttgggaggaagccakattctccttatcttttagctttagatcgwaatccaggaagtagaacaatgtctattgttgcta

SEQ ID NO: 1661 - DNA, 3546 bp, Homo sapiens
  misc_feature (1976)..(1976): n equals a,t,g, or c
  misc_feature (3346)..(3346): n equals a,t,g, or c
tgctcttcgccttctctctgccccgggagccgcgcgtccaaccagcccccgggtggtggcggcggacggcggggactgtcccggcggcaaaggcaagagcatcaactgctcagaattaaatgtgagggagtctgacgtaagagtttgtgatgagtcatcatgtaaatatggaggagtctgtaaagaagatggagatggtttgaaatgtgcatgccaatttcagtgccatacaaattatattcctgtctgtggatcaaatggggacacttatcaaaatgaatgctttctcagaagggctgcttgtaagcaccagaaagagataacagtaatagcaagaggaccatgctactctgataatggatctggatctggagaaggagaagaggaagggtcaggggcagaagttcacagaaaacactccaagtgtggaccctgcaaatataaagctgagtgtgatgaagatgcagaaaatgttgggtgtgtatgtaatatagattgcagtggatacagttttaatcctgtgtgtgcttctgatgggagttcctataacaatccctgttttgttcgagaagcatcttgtataaagcaagaacaaattgatataaggcatcttggtcattgcacagatacagatgacactagtttgttgggaaagaaagatgatggactacaatatcgaccagatgtgaaagatgctagtgatcaaagagaagatgtttatattggaaaccacatgccttgccctgaaaacctcaatggttactgcatccatggaaaatgtgaattcatctattctactcagaaggcttcttgtagatgtgaatctggctacactggacagcactgtgaaaagacagactttagtattctctatgtagtgccaagtaggcaaaagctcactcatgttcttattgcagcaattattggagctgtacagattgccatcatagtagcaattgtaatgtgcataacaagaaaatgccccaaaaacaatagaggacgtcgacagaagcaaaacctaggtcattttacttcagatacgtcatccagaatggtttaaactgatgacttttatatgtacactgaccatgtgatgtacatttattatgtctttttttaaagaatggaaatatttatttcagaggccttatttttggacatttttagtgtagtactgttggctcgtatttagaatattcagctacgacagttttggactgtttagtagtctttgttttatgtttttaaatacagaaattgctttcacaaatttgtaccacatggtaattctaagacttgttctttacccatggaatgtaatattttggaaagatggactacttcacaaatgggttataaagtcatattccacttcttccacaaatgaccacaggaaattgaccaagcatgaacttaagaatcgcctgtcggtgttacagagtgaaggaccagacgctgctcttaccattgtgactgtgctggacaaagtagcctccatcgtggacagtgtgcaggcaagccagaagagaatagaagagagacacagggaaatggaaaatgccataaaatccgtccagattgacctgttgagctttcacagtcgcatagcaatacagggcatatcattaacaaattgtttgagaaaacccgaaaagttagtgctcacattaaagatgtgaaagcccgggtggagaagcaacaaattcatgttaaaaaagttgaagtcaagcaagaggaaataatgaagaaaaacaaattccgcgtggtaatattccaggagaagtttcggtgtccgacatccctgtctgttgttaaagacagaaacctaactgagaaccaagaagaggatgatgatgatatctttggatcccccagtaggatcttgtcttcggatgaagattattatgttgaagaaagcaggtcttgccaggcttaggaagtccggccaggagccccttgataatatccagaaggcnttttccaaagaaaactgcgaagacccggcagaatcttgaccagaaagtgaacgaattagaactagaatagtgaccccggagaggagagagaggctaaggcagtcaggagtagaggctgagtacagtcaggggagaggctgagacagtcagggggagaggtttaagaaatctatttctaatgcagctccctcaaaggaagcttttaagatgcgcagcctcaggaaaggtaaggaccgaacagtggctgaaggtgaggaattgtgccaggggagatggtgttggacatcatgcaggagcgagtcttctggcccatcaggagctctctctgatgagtcatgaccaaaaacgaggcagccaggccggtgtatcctccccatgaaggaagagaaatccccacccccgacctttaaaagttacttttaaatctcaggtgaaagtagaggatgatgaatctcttttggttagatttaaagcactcatcgtaaagagggaattaagtatatcctaaatatgaatctcctaatcatgcagttttagtttgaatagtgtagtcgtcacatttctgtgccatgtaggaaaacataaatgtaatttttttcttatatttaaaatcttgaagataatataaatattattatcactctttctcatggcagctgtggattttttagttcctttctcttgtccaccagaaaaatagtttcctaggttgggccagttacgtgtttggtaagggcaactttgcgccgtcatttgcaggagaactctaaatattggttaggattaatattgtggccacctcaaggggaataactcatgtgtgggttatatcgtccagatgttcagatcaacagatttgttagtaaattagcagtcacaccccttttttgatgctttcacattaaaaaattgaagttttggacttgagcatttggctctagtatcatagctttacttaaaagaaaaccctggcaagtcatctgcttattctcatcagtaaaaatggagagggttggcctctctcctgcctcagaggactgttgtgatgatcaaaggaaatggtacacattctgggggaacaagaagcacacccagagaaaacaacctcatcagttcctccmaaacagaatggaaagagttacaccttctgaaagccctcagcaccaatcagtaaggtcctaggttggagagaaactaaagctggtcttcagaaccttttcacagaatcaagagtgaaaaataagtaaatgtttgggtgccactttttcatcagactaactatatcttgggttttagttgggtccaaatgttccccagccagaccctttctaatttccttttgattaagatctttggtggactatagcacntaaatttgtttaagcagtatgaggcataaaattgtgactatgtttctaaagtcggccctgatgcattgggtttggaaatgaccacaaatattcctgttttcctgagtgtacccttcagggtccagctgtccaaaacagtgttgataggagttcatcatacctcctttgggaggaagccaagattctccttatcttttagc

SEQ ID NO: 1662 - DNA, 1565 bp, Homo sapiens
tgggcgcgcggctggatgcccccggcctgcggctccctgcgcttcccgccgtccaggggcaccagtcatgggcgccgcagccgctgaggcgccgctccggctgcctgccgcgcctccgctcgccttctgctgctacacgtcggtgcttctgctcttcgccttctctctgcccgggagccgcgcgtccaaccagcccccgggtggtggcggcggcagcggcggggactgtcccggcggcaaaggcaagagcatcaactgctcagaattaaatgtgagggagtctgacgtaagagtttgtgatgagtcatcatgtaaatatggaggagtctgtaaagaagatggagatggtttgaaatgtgcatgccaatttcagtgccatacaaattatattcctgtctgtggatcaaatggggacacttatcaaaatgaatgctttctcagaagggctgcttgtaagcaccagaaagagataacagtaatagcaagaggaccatgctactctgataatggatctggatctggagaaggagaagaggaagggtcaggggcagaagttcacagaaaacactccaagtgtggaccctgcaaatataaagctgagtgtgatgaagatgcagaaaatgttgggtgtgtatgtaatatagattgcagtggatacagttttaatcctgtgtgtgcttctgatgggagttcctataacaatccctgttttgttcgagaagcatcttgtataaagcaagaacaaattgatataaggcatcttggtcattgcacagatacagatgacactagtttgttgggaaagaaagatgatggactacaatatcgaccagatgtgaaagatgctagtgatcaaagagaagatgtttatattggaaaccacatgccttgccctgaaaacctcaatggttactgcatccatggaaaatgtgaattcatctattctactcagaaggcttcttgtagatgtgaatctggctacactggacagcactgtgaaaagacagactttagtattctctatgtagtgccaagtaggcaaaagctcactcatgttcttattgcagcaattattggagctgtacagattgccatcatagtagcaattgtaatgtgcataacaagaaaatgccccaaaaacaatagaggacgtcgacagaagcaaaacctaggtcattttacttcagatacgtcatccagaatggtttaaactgatgacttttatatgtacactgaccatgtgatgtacatttattatgtctttttttaaagaatggaaatatttatttcagaggccttatttttggacatttttagtgtagtactgttggctcgtatttagaatattcagctacgacagttttggactgtttagtagtctttgttttatgtttttaaatacagaaattgctttcacaaatttgtaccacatggtaattctaagacttgttctttacccatggaatgtaatatttttgcaaagatggactacttcacaaatggttataaagtcatatccacttcttccacaatgaccacagcaaatgaccaagcatgaactaaag

SEQ ID NO: 1663 - DNA, 1214 bp, Homo sapiens
caaaagctggagctccaccgcggtggcggccgctctagaactagtggatcccccggkctgcaggaattcggcacgaggcaaagtgggatgatctgtcactacacctgcagcaccacgctcggaggacagctcctgcctgcagcttccagacccaggaagcctgaggggaaggaaggaagtacgggcgaaatcatcagattggcttcccagatttgggaatctgaagcgggcccacatcttccggccaacttccattgaacttcccagcactcgaaagggaccgaaatggagagcaaagaaccccagctcaaagggattgtgacaaggttattcagccagcagggatacttcctgcagatgcacccagatggtaccattgatgggaccaaggacgaaaacagcgactacactctcttcaatctaattcccgtgggcctgcgtgtagtggccatccaaggagtgaaggctagcctctatgtggccatgaatggtgaaggctatctctacagttcagatgttttcactccagaatgcaaattcaaggaatctgtgtttgaaaactactatgtgatctattcttccacactgtaccgccagcaagaatcaggccgagcttggtttctgggactcaataaagaaggtcaaattatgaaggggaacagagtgaagaaaaccaagccctcatcacattttgtaccgaaacctattgaagtgtgtatgtacagagaaccatcgctacatgaaattggagaaaaacaagggcgttcaaggaaaagttctggaacaccaaccatgaatggaggcaaagttgtgaatcaagattcaacatagctgagaactctccccttcttccctctctcatcccttccccttcccttccttcccatttacccatttccttccagtaaatccacccaaggagaggaaaataaaatgacaacgcaagacctagtggctaagattctgcactcaaaatcttcctttgtgtaggacaagaaaattgaaccaaagcttgcttgttgcaatgtggtagaaaattcacgtgcacaaagattagcacacttaaaagcaaaggaaaaaataaatcagaactccataaatattaaactaaactgtattgttattagtagaaggctaattgtaatgaagacattaataaagatgaaataaacttattamtttaaaaaaaaaaaaaaaaaaaccggcacgagcgg

SEQ ID NO: 1664 - DNA, 1033 bp, Homo sapiens
ctttgataaaaatgttatactctaggataatttgaaatcatttttgtgaaagaattaaattcattaaggctattcgatgccatacaagattttccttttacataaaacaatcttaaattacatctcaaaaataatttcttacacttttcttgatgataaatggttcctggctatatattttataggtattaacatagtttataatttggaaatgttcaatttcatggttacaaaaaaaatcctgcaaacagaatgtaatggtgtgtcaattccagatgcccaaataaaatacaaaatcaagcaaaaccacacatcgcagcattatcatgagtttaagctattgagtatataacatcagtttgtgagttcaattctccaaatcctttcctttaaagtaataagtttatttcatctttattaatgtcttcattacaattagccttctactaatamcaatacagtttagtttaatatttatggagttctgatttattttttcctttgcttttaagtgtgctaatctttgtgcacgtgaattttctaccacattgcamcaagcaagctttggttcaattttcttgtcctacacaaaggaagattttgagtgcagaatcttagccactaggtcttgcgttgtcattttattttcctctccttgggtggatttactgraaggaaatgggtaaatgggaargaagggaargggaagggatgagagagggaagaaggggagagttctcagctatgttgaatcttgattcacaactttgcctccattcatggttggtgttccagaacttttccttgaacgcccttgtttttctccaatttcatgtagcgatggttctctgtacatacacacttcaataggtttcggtacaaaatgtgatgagggcttggttttcttcactctgttccccttcataatttgaccttctttattgagtcccagaaaccaagctcggcctgattcttgctggcggtacagtgtggaagaatagatcacatagtagttttcaaacacagattccca

SEQ ID NO: 1665 - DNA, 621 bp, Homo sapiens
  misc_feature (9)..(9): n equals a,t,g, or c
  misc_feature (31)..(31): n equals a,t,g, or c
  misc_feature (56)..(56): n equals a,t,g, or c
aaatttaancgcacataaaacaccaaaccgnatgttacaaaatgtatgcagatttntggatattatcaatgagaagacatagcatgtaacttctcctatatctctactgtccagcatgtattgttccaaatatgactcccctaaaatatatacactttgcagaagctctaggccctcacctcaaaccttgccattggttgccgtatttcaaggtcaatatagtttccctcactttacacaatcattattcttcaatagtggaccatatccttcaccaggtatcctawttctgttatctagaggttagcagmaatgmmatgaaggaatttccctaagcagttgggaagaacaaattgtatgcatgtaggcaaagattttgaagatacatttgcaagagatatttgtttaaccaaaatatttggaaagtaacaaataaagacatttaaattttctaaaaatggacttgctcttctaggaaaagaatacccctggggcaaaaatataactctagctgtatttcttcttgtcactcttgattcaacttgattataaatacacctgtcactaccagaaccaaaaaaaaaaaraaaaaamtcccaagcacaaagcttattttatttg

SEQ ID NO: 1666 - DNA, 657 bp, Homo sapiens
  misc_feature (625)..(625): n equals a,t,g, or c
  misc_feature (631)..(631): n equals a,t,g, or c
  misc_feature (648)..(648): n equals a,t,g, or c
  misc_feature (650)..(650): n equals a,t,g, or c
  misc_feature (657)..(657): n equals a,t,g, or c
gattcagattttctatttcttcttgtgctagtattggtaatttgtgtcttggtaggaatttatctatttaagttatataatttgttggcatatacttgtttataggtttccttatgatactattaatttatataagtttgtttgtgttatcttctctttcagtcctaatgttactaatttatgtcttccttttttgttggtcattctagccaaaggcttgtcaatttgttgatcagatttaagaaataacttttggttttgttattttctatttagtttatttgaagtctaatgttcattttttctttccttctgtttgcttttggtttagtttgctcttcttttcctactttattaaggttaaaggttgggttactgatttgagaacttttttagcattttatagaaattattttccttccaaacacgcttaaggtgcatcacataagtttggtatgtttttttattttcatcactcaacacttttctaattcccttttgattatctaaaacccacggtgttagggcacataattccacaattttgattacaattccttacacgatctatccaccacgtgtgaggcaagaaatcaatcagtatgggtatagctgctaaacccanagccangcctgagggaaccccangngaagtcn

SEQ ID NO: 1667 - DNA, 1803 bp, Homo sapiens
gattcagattttctatttcttcttgtgctagtattggtaatttgtgtcttggtaggaatttatctatttaagttatataatttgttggcatatacttgtttataggtttccttatgatactattaatttatataagtttgtttgtgttatcttctctttcagtcctaatgttactaatttatgtcttccttttttgttggtcattctagccaaaggcttgtcaatttgttgatcagatttaagaaataacttttggttttgttattttctatttagtttatttgaagtctaatgttcattttttctttccttctgtttgcttttggtttagtttgctcttcttttcctactttattaaggttaaaggttgggttactgatttgagaacttttttagcattttatagaaattattttccttccaaacacgcttaaggtgcatcacataagtttggtatgtttttttattttcattcatctcaacatcttttctaatttcccttttgatttattctaaaacccactggttgtttaggagcacattaatttccacatatttttgaattacaaattttccttttactactgatttctaatctcactctactgtggttgaaggacatatgtatataatttcaataattctaagtttatkgtgggttattttaaggccttgcttatatactctcctagagaatgtttcatacatgcacttaggaagagtgtatattcttctattgtsctgtaaattgatttacagatatgtgttaagtttagttggtttatattattattattcaagttttctatacctccgttcttttgcctakatattttattcattattcaatgtgtgatattggaattctcaactatttttttaaatcatatatttatttcttcaattatgtcatttcttttgcctcatgtattttgggattcttctgttatatgcatgcacatttataattgttatattttcccaatggattgatattttatcattataaaatatctctttttatcgctatcaacatttttgaccaaaaaactattttgtctgatattagcatagcccctccagatctcttatggctgttttcgcacaacatcggtttccgcctttttagtttcaacctatttgtatctttgaaagcaaagtatgtcttttgtagacaccataagtaggattggatcttgtttttctatcagacaatctctgccttttgattggatagtttaattgattcacatttaatattattattgatatgctttgatttatgtttacaattgtgcttttggtttctatatattttgtgtctwwtgtgttccwctagtccttttttctgtcttatattaagtagttattttctagagtaactttttcatttctttaatggttttcactacattttttagcaattttcctggttgktgctttgacttatggattatatgtcaagttaaactacttcaaataattccaataagatagaaaatcttagttcctttatagcttctgtacctcccaccccctttgcgatattgtatatactacatctattcatattacaaaaaacaatatagtattacaattattgctttacataattgtgtgtcttttaaagaaggtaagagaataaaggagaaaaaaatatatttataccatttttatattaaccttatttaccatttctgtctttgtgtatttctcctgatgaagtcaggttattgtgtggtgatatctctttactccagcctgggcgcaacagagtgagtctctgtctcaccaaaaaaaaaa

SEQ ID NO: 1668 - DNA, 2010 bp, Homo sapiens; identical to SEQ ID NO: 1659

SEQ ID NO: 1669 - DNA, 1939 bp, Homo sapiens
ggtcggcttgtcaggtggtggaggaaaaggcgctccgtcatggggatccagacggtaagaccctcattcagtatcctccactgggggacccctccccatctggttctggccactcagctccggaccaggggctgtcgctgccgaccccgccccgcagggctctgggcccaccgtggatgctggggtcccgatcccgcacatccgggctcgggactccgccaggttacccctctgcccttggcatgcctccgcgctggagctcgggatcgccacccctgggacggtcaccacccaagccccgggctcttacccagcctggcggtcacgctgcctcctctacccagacgagccccgtcctgctggcctccctgggggtggggctggtcactctgctcggcctggctgtgggctcctacttggttcggaggtcccgccggcctcaggtcactctcctggaccccaatgaaaagtacctgctacgactgctagacaagacgactgtgagccacaacaccaagaggttccgctttgccctgcccaccgcccaccacactctggggctgcctgtgggcaaacatatctacctctccacccgaattgatggcagcctggtcatcaggccatacactcctgtcaccagtgatgaggatcaaggctatgtggatcttgtcatcaaggtctacctgaagggtgtgcaccccaaatttcctgagggagggaagatgtctcagtacctggatagcctgaaggttggggatgtggtggagtttcgggggccaagcgggttgctcacttacactggaaaagggcattttaacattcagcccaacaagaaatctccaccagaaccccgagtggcgaagaaactgggaatgattgccggcgggacaggaatcaccccaatgctacagctgatccgggccatcctgaaagtccctgaagatccaacccagtgctttctgctttttgccaaccagacagaaaaggatatcatcttgcgggaggacttagaggaactgcaggcccgctatcccaatcgctttaagctctggttcactctggatcatcccccaaaagattgggcctacagcaagggctttgtgactgccgacatgatccgggaacacctgcccgctccaggggatgatgtgctggtactgctttgtgggccacccccaatggtgcagctggcctgccatcccaacttggacaaactgggctactcacaaaagatgcgattcacctactgagcatcctccagcttccctggtgctgttcgctgcagttgttccccatcagtactcaagcactataagccttagattcctttcctcagagtttcaggttttttcagttacatctagagctgaaatctggatagtacctgcaggaacaatattcctgtagccatggaagagggccaaggctcagtcactccttggatggcctcctaaatctccccgtggcaacaggtccaggagaggcccatggagcagtctcttccatggagtaagaaggaagggagcatgtacgcttggtccaagattggctagttccttgatagcatcttactctcaccttctttgtgtctgtgatgaaaggaacagtctgtgcaatgggttttacttaaacttcactgttcaacctatgagcaaatctgtatgtgtgagtataagttgagcatagcatacttccagaggtggtcttatggagatggcaagaaaggaggaaatgatttcttcagatctcaaaggagtctgaaatatcatatttctgtgtgtgtctctctcagcccctgcccaggctagagggaaacagctactgataatcgaaaactgctgtttgtggcaggaacccctggctgtgcaaataaatggggctgaggcccctgtgtgatattgaaaaaaaaaaaaaaaaaaaaaaaaaaaaaaaactcgag

SEQ ID NO: 1670 - DNA, 1698 bp, Homo sapiens; identical to SEQ ID NO: 331

SEQ ID NO: 1671 - DNA, 606 bp, Homo sapiens
  misc_feature (53)..(53): n equals a,t,g, or c
  misc_feature (97)..(97): n equals a,t,g, or c
  misc_feature (122)..(122): n equals a,t,g, or c
  misc_feature (234)..(234): n equals a,t,g, or c
acttgatagagtcatttctggtctatggttatttagtggtcctggtggtggtntccgccttccagtttatatgctgaagagtctgtttgaagatagnggaaagtagaactaaaatccaaacngagtacgtaacttgaaaatgaggcataaaatgcataaacgttacgtcagaccttatggtcttctccaaatattttgagatataaagtaggaaacggtataattttaatgtgnaaaattaagtcttcactttctgtgccaagtaatcctgctgatccagttgtacttaagtgtgtaacaggaatattttgcagaatataggtttaactgaatgaagccatattaataactgccattttcctaactttgaaaaattttgcaaatgtcttaggtgatttaaataaatgagtattgggcctaattgcaacaccagtctgtttttaacaggttctattacccagaacttttttgtaaatgcggcagttacaaattaactgtggaagttttcagttttaagttataaatcacctgagaattacctaatgatggattgaataaatctttagactacaaaaaaaaaaaaaaaaaaaaaaaaaaaaactcgta

SEQ ID NO: 1672 - DNA, 3125 bp, Homo sapiens
  misc_feature (32)..(32): n equals a,t,g, or c
  misc_feature (39)..(39): n equals a,t,g, or c
  misc_feature (50)..(50): n equals a,t,g, or c
  misc_feature (1555)..(1555): n equals a,t,g, or c
  misc_feature (1642)..(1642): n equals a,t,g, or c
  misc_feature (3108)..(3108): n equals a,t,g, or c
tgggagaccaggcccaagaccaagaagtttgnaagaatntattcctggcncagatatatgggatatgaactggaagccatcctggaatccatcaacagcatcaagtcagctaagcaaaagtgggcccatccaactttgcttagagcatttgaagctcgtgatcgaaacatacaagaaagcaactttgatagagtcaatttctggtctatggttaatttagtggtcatggtggtggtgtcagccattcaagtttatatgctgaagagtctgtttgaagataagaggaaaagtagaacttaaaactccaaactagagtacgtaacattgaaaaatgaggcataaaaatgcaataaactgttacagtcaagaccattaatggtcttctccaaaatattttgagatataaaagtaggaaacaggtataattttaatgtgaaaattaagtcttcactttctgtgcaagtaatcctgctgatccagttgtacttaagtgtgtaacaggaatattttgcagaatataggtttaactgaatgaagccatattaataactgcattttcctaactttgaaaaattttgcaaatgtcttaggtgatttaaataaatgagtattgggcctaattgcaacaccagtctgtttttaacaggttctattacccagaacttttttgtaaatgcggcagttacaaattaactgtggaagttttcagttttaagttataaatcacctgagaattacctaatgatggattgaataaatctttagactacaaaagcccaacttttctctatttacatatgcatctctcctataatgtaaatagaataatagctttgaaatacaattaggtttttgagatttttataaccaaatacatttcagtgtaacatattagcagaaagcattagtctttgtactttgcttacattcccaaaagctgacattttcacgattcttaaaaacacaaagttacacttactaaaattaggacatgttttctctttgaaatgaagaatatagtttaaaagcttcctcctccatagggacacattttctctaacccttaactaaagtgtaggattttaaaattaaatgtgaggtaaaataagtttatttttaatagtatctgtcaagttaatatctgtcaacagttaataatcatgttatgttaattttaacatgattgctgacttggataattcattattaccagcagttatgaaggaaatattgctaaaatgatctgggcctaccataaataaatatctccttttctgagctctaagaattatcagaaacaggaaagaatttagaaaaacttgagaaaacctaatccaaaataaaattcacttaagtagaactataaataaatatctagaatctgactggctcatcatgacatcctactcataacataaatcaaaggagatgattaatttccagttagctggaagaaactttggctgtaggtttttattttctacaagaattctggtttgaattatttttgtaagcaggtacattttataaaatgtaagccctactgtaaggtttnaaarcactgggtgacatatttattaaaaatttttattataacaacttttattaaaatggcctttctgaacactttatttattgatgnttgaagtaaggattagaaacatagactcccaagttttaaacacctaaatgtgaataacccatatatacmacaaagtttctgccatctagctttttgaagtctatgggggtcttactcaagkactagtaatttaacttcatcatgaatgaactataatttttaagttatgcccatttataacgttgtttatgmctacattgtgagttagaaacaaacttaaaatttggggtatagaacccctcaacaggttagtaatgctggaattcttgatgagcaataatgataaccagagagtgatttcatttacactcatagtagtataaaaagagatacatttccctcttaggcccctgggagaagagcagcttagatttccctactggcaaggtttttaaaaatgaggtaaatgccgtatatgatcaattaccttaattggccaagaaaatgcttcaggtgtctaggggtatcctctgcaacacttgcagaacaaaggtcaataagatccttgcctatgaatacccctcccttttgcgctgttaaatttgcaatgagaagcaaatttacagtaccataactaataaagcagggtacagatataaactactgcatcttttctataaaactgtgattaagaattctacctctcctgtatggctgttactgtactgtactctctgactccttacctaacaatgaatttgttacataatcttctacatgtatgatttgtgccactgatcttaaacctatgattcagtaacttcttaccatataaaaacgataattgctttatttggaaaagaatttaggaatactaaggacaattatttttatagacmaagtaaaaagacagatatttaagaggcataaccaaaaaagcaaaacttgtaaacagagtaaaaatctttaatatttctaaagacatactgkttatctgcttcatatgctttttttaatttcactattccatttctaaattaaagktatgctaaattgagtaagctgtttatcacttaacagctcattttgtctttttcaatatacaaattttaaaaatactacaatatttaactaaggcccaaccgatttccataatgtagcagttaccgtgttcacctcacactaaggcctagagtttgctctgatatgcatttggatgattaatgttatgctgttctttcatgtgaatgtcaagacatggagggtgtttgtaattttatggtaaaattaatccttcttacacataatggtgtcttaaaattgacaaaamatgagcacttacaattgtatgtctcctcaaatgaaaattctttatctgaaattttaaaagacattgattccgcatgtaaggatttttcatctgaagtacaatmatgcacaatcagtgttgctcaaactgctttatacttataaacagccatcttaaataagcaacgtattgkgagtactgatatggtatcccatanaaattatcaaaggaaca

SEQ ID NO: 1673 - DNA, 2146 bp, Homo sapiens
  misc_feature (17)..(17): n equals a,t,g, or c
  misc_feature (20)..(20): n equals a,t,g, or c
  misc_feature (32)..(32): n equals a,t,g, or c
  misc_feature (75)..(75): n equals a,t,g, or c
  misc_feature (80)..(80): n equals a,t,g, or c
  misc_feature (106)..(106): n equals a,t,g, or c
  misc_feature (108)..(108): n equals a,t,g, or c
cggccttttgaagtgangcngatacccggctngccggcaagcccgaacggcccgaagcgcaagcgagtcagtgancgagnaagggaaagagcgcccaatacgcaancngcctctccccgcgcgttggccgattcattaatgcagctggcacgacaggtttcccgactggaaagcgggcagtgagcgcaacgcaattaatgtgagttagctcactcattaggcaccccaggctttacactttatgcktccggctcgtatgttgtgtggaattgtgagcggataacaatttcacacaggaaacagctatgaccatgattacgccaagctcgaaattaaccctcactaaagggaacaaaagctggagctccaccgcggtggcggccgctctagaactagtggatcccccgggctgcaggaattcggcacgagaaagaattaaccagctcttcagtcaagcaaatcctctactcaccatgcttcctcctgccattcatttctatctccttccccttgcatgcatcctaatgaaaagctgtttggcttttaaaaatgatgccacagaaatcctttattcacatgtggttaaacctgttccagcacaccccagcagcaacagcacgttgaatcaagccagaaatggaggcaggcatttcagtaacactggactggatcggaacactcgggttcaagtgggttgccgggaactgcgttccaccaaatacatctctgatggccagtgcaccagcatcagccctctgaaggagctggtgtgtgctggcgagtgcttgcccctgccagtgctccctaactggattggaggaggctatggaacaaagtactggagcaggaggagctcccaggagtggcggtgtgtcaatgacaaaacccgtacccagagaatccagctgcagtgccaagatggcagcacacgcacctacaaaatcacagtagtcactgcctgcaagtgcaagaggtacacccggcagcacaacgagtccagtcacaactttgagagcatgtcacctgccaagccagtccagcatcacagagagcggaaaagagccagcaaatccagcaagcacagcatgagttagaactcagactcccataactagacttactagtaaccatctgctttacagatttgattgcttggaagactcaagcctgccactgctgttttctcacttgaaagtatatgctttctgctttgatcaaacccagcaagctgtcttaagtatcaggaccttctttgggaatagtttttccttttcaagtttttcaagatgtaggtatatccatgaatgcaatttgcatttaaattccacgtatcctgtagttttaattcctcattgttcttaaaagactgttgatactataaacatcagtgaatcattatattttaaaacagaaaagggcttctcagataccctccatctactggcccatcccctctcctaaacaaaactccttcaaaacaggttaaaaaaaatatgttgtcatgaatcttcacagtaacatttcagaaaggtgcttttttggtactcttcatgggaacagtttagcagccatgagtgatcttcctttgaaagagaatgaaagaccctgtgacatttcacttcaaaaataagccctgtagctctttacggtcgcatagtataaaattataccctgcatgctgaccctcgcttggaatggaatgccagaaatgcatggcagcagctaataagtaaagctgattaactatttatttgtcaatgttattatttaatgagctttcacatgtgatttgtttcaaaactttaattttttaatgttttgaaactttttcatggacctaaatattttcctatatgatttgtggttgattagaaatatgaaatacatgttgtagatatgtaaaatgaatattttagtctccttattacatatatgttcatggtgaactttatcaatagtatggatctttttaaatcaataagatgctttgtaaagttgaaataagtaatactttcttgtttaatctgtgcaatcagaaggtgtcttgaccttcaattcaattggtttcttttaacaaaaataaacactgctaaaagttaaaaaaaaaaaaaaaagcggccgctctagaggatccaagcttgggtac

SEQ ID NO: 1674 - DNA, 684 bp, Homo sapiens
  misc_feature (504)..(504): n equals a,t,g, or c
caccatgcttcctcctgccattcatttctatctccttccccttgcatgcatcctaatgaaaagctgtttggcttttaaaaatgatgccacagaaatcctttattcacatgtggttaaacctgttccagcacaccccagcagcaacagcacgttgaatcaagccagaaatggaggcaggcatttcagtaacactggactggatcggaacactcgggttcaagtgggttgccgggaactgcgttccaccaaatacmyctctgatggccagtgcaccagcatcagccctctgaaggagctggtgtgtgctggcgagtgcttgcccctgccagtgctccctaactggattggaggaggctatggaacaaagtactggagcaggaggagctcccaggagtggcggtgtgtcaatgacaaaacccgtacccagagaatccagctgcagtgccaagatggcagcacacgcacctacaaaatcacagtagtcactgcctgcaagtgcaagangtacacccggcagcacaacgagtccagtcacaactttgagagcatgtacctgccaagccagtcacatcacagagagcggaaaagaccacaaatccagaagacagatgagtagaactagactccatactagattatagaaccattggttacagattgatgttggaaactaagctgcctgtg

SEQ ID NO: 1675 - DNA, 750 bp, Homo sapiens
  misc_feature (8)..(8): n equals a,t,g, or c
  misc_feature (83)..(83): n equals a,t,g, or c
  misc_feature (640)..(640): n equals a,t,g, or c
ccaaaaancttggagctccacccgccgttgccggccgctttttagaacttattggaatcccccgggctgcaggaatttcggcnacgagttcgctggtgggaagaagccgagatgscggcagccagcgctggggcaacccggctgctcctgctcttgctgatggcggtagcagcgcccagtcgagcccggggcagcggctgccgggccgggactggtgcgcgaggggctggggcggaaggtcgagagggcgaggcctgtggcacggtggggctgctgctggagcactcatttgagatcgatgacagtgccaacttccggaagcggggctcactgctctggaaccagcaggatggtaccttgtccctgtcacagcggcagctcagcgaggaggagcggggccgactccgggatgtggcagcatcctacctggactgcggtgctacgagggcctgcgggcctttgctgtgtgccaccctccctgtaagtctatttaaaaacatcgacgatacattgaaatgtgtgaacgttttgaaaagctacagcttccagcagccaaaagcaactgttgttttggcaagacggtcctgatgtacaagcttgattgaaattcactgctcacttgatacgttattcagaaamnccaaggaatggctgtccccatcctcatgtggctgtgtggagctcarctgtgttgtgtggcagtttattaaactgtcccccagataaaaaaaaaaaaaaaraaactcgagg

SEQ ID NO: 1676 - DNA, 1417 bp, Homo sapiens
tcgtccgggaagaagccgagatggcggcagccagcgctggggcaacccggctgctcctgctcttgctgatggcggtagcagcgcccagtcgagcccggggcagcggctgccgggccgggactggtgcgcgaggggctggggcggaaggtcgagagggcgaggcctgtggcacggtggggctgctgctggagcactcatttgagatcgatgacagkggccaacttccggaagcggggctcactgctctggaaccagcaggatggtaccttgtccctgtcacagcggcagctcagcgaggwkgagcggggccgactccgggatgtggcagccctgaatggcctgtaccgggtccggatcccaaggcgacccggggccctggatggcctggaagctggtggctatgtctcctcctttgtccctgcgtgctccctggtggagtcgcacctgtcggaccagctgaccctgcacgtggatgtggccggcaacgtggtgggcgtgtcggtggtgacgcaccccatggccccatgcagccccaggggcttcccccctgcccatggagtagagcccgagatcctggccactatgccagttctgacctcgcatccccctaccccgagcccatgcagtctgggaacatgccgccttctctccagcctctgtgcctttgttccaggtggtctcaccctcctgtccctggctgggctaggtggtcctgtccaggctcctgcagcgcccccctcactttgacactggactaggatgcagcctcccttctgtgtccccttgagggtaccctgggtcccctcatcaggggcagaggcatgaaagagtcggggctggatggccaggggcttctgggcccgacgcctagtgcagcccctggggtcgtggtttgacatttgtctgcctggtgcaaacaaggaatccttgcctttaaggtgacaggccctccacaggcttccagacttgaaggaaaaggtttaagaaagaaaacaaaaccaacagttagtggagtcaaagcccagacactgtaaatagaaccccctccaccaccccccgccgcccagcatcctacctggactgcggtgctacgagggcctgcgggcctttgctgtgtgccaccctccctgtaagtctatttaaaaacatcgacgatacattgaaatgtgtgaacgttttgaaaagctacagcttccagcagccaaaagcaactgttgttttggcaagacggtcctgatgtacaagcttgattgaaattcactgctcacttgatacgttattcagaaacccaaggaatggctgtccccatcctcatgtggctgtgtggagctcagctgtgttgtgtggcagtttattaaactgtcccccagatcgaaaaaaaaaaaaaaaaaaaaaaaaaaaaaaaaaaaaaaaaaag

SEQ ID NO: 1677 - DNA, 1673 bp, Homo sapiens
  misc_feature (4)..(4): n equals a,t,g, or c
  misc_feature (31)..(31): n equals a,t,g, or c
  misc_feature (61)..(61): n equals a,t,g, or c
  misc_feature (1671)..(1671): n equals a,t,g, or c
  misc_feature (1673)..(1673): n equals a,t,g, or c
tccnactcactataggaaagctgtacgcctncaggtcccggtccgaaattcccggggtcgnacccacgcgtccggcggctcttggctcacagccgtcccttcgctggtgggaagaagccgagatggcggcagccagcgctggggcaacccggctgctcctgctcttgctgatggcggtagcagcgcccagtcgagcccggggcagcggctgccgggccgggactggtgcgcgaggggctggggcggaaggtcgagagggcgaggcctgtggcacggtggggctgctgctggagcactcatttgagatcgatgacagtgccaacttccggaagcggggctcactgctctggaaccagcaggatggtaccttgtccctgtcacagcggcagctcagcgaggaggagcggggccgactccgggatgtggcagccctgaatggcctgtaccgggtccggatcccaaggcgacccggggccctggatggcctggaagctggtggctatgtctcctcctttgtccctgcgtgctccctggtggagtcgcacctgtcggaccagctgaccctgcacgtggatgtggccggcaacgtggtgggcgtgtcggtggtgacgcaccctgggggctgccggggccatgaggtggaggacgtggacctggagctgttcaacacctcggtgcagctgcagccgcccaccacagccccaggccctgagacggcggccttcattgagcgcctggagatggaacaggcccagaaggccaagaacccccaggagcagaagtccttcttcgccaaatactggatgtacatcattcccgtcgtcctgttcctcatgatgtcaggagcgccagacaccgggggccagggtgggggtgggggtgggggtggtggtgggggtagtggccggtgagggcccaggctggtcagcgtcccgtcttgcacacccaggggcctccctttctgctggagtcccctgtgtcctcagccatcccaagaagggtttgctggtccctcctttccccccgtcccacgaggccacctgggccagccccttgtcctctgccttctgctggcagaggagcagctggactggggcctttggcacagcagccggtgtctcctgcgcccgcctcccccatggccccatgcagccccaggggcttcccccctgcccatggagtagagcccgagatcctggccactatgccagttctgacctcgcatccccctaccccgagcccatgcagtctgggaacatgccgmcttctctccagcctctgtgcctttgttccaggtggkctcaccctcctgtccctggctgggctaggtggtcctgtccaggctcctgcagcgcccccctcactttgacactggactaggatgcagcctcccttctgtgtccccttgagggtaccctgggtcccctcatcaggggcagaggcatgaaagagtcggkgctggatggccaggggcttctgggcccgacgcctagtgcagcccctggggtcgtggtttgacatttgtctgcctggtgcaaacaaggaatccttgcctttaaggtgacaggccctccacaggcttccagacttgaaggaaaaggtttaagaaaaaaaaaaaaaaatgaccctcgaggggggaccggaaccggtcgagattccttttcccctcgncn

SEQ ID NO: 1678 - DNA, 1001 bp, Homo sapiens
gctccaccgcggtggcggccgctctagaactagtggatcccccgggctgcaggaattcggcacgagcttcgctggtgggaagaagccgagatggcggcagccagcgctggggcaacccggctgctcctgctcttgctgatggcggtagcagcgcccagtcgagcccggggcagcggctgccgggccgggactggtgcgcgaggggctggggcggaaggtcgagagggcgaggcctgtggcacggtggggctgctgctggagcactcatttgagatcgatgacagtgccaacttccggaagcggggctcactgctctggaaccagcaggatggtaccttgtccctgtcacagcggcagctcagcgaggaggagcggggccgactccgggatgtggcagcatcctacctggactgcggtgctacgagggcctgcgggcctttgctgtgtgccaccctccctgtaagtctatttaaaaacatcgacgatacattgaaatgtgtgaacgttttgaaaagctacagcttccagcagccaaaagcaactgttgttttggcaagacggtcctgatgtacaagcttgattgaaattcactgcrcactrgatacgttattcagaaacccaaggaatggctgtccccatcctcatgtggctgtgtggagctcagctgtgttgtgtggcagtttattaaactgtcccccagataaaaaaaaaaaaaaaaaaactcgagggggggcccggtacccaattcgccctatagtgagtcgtattacaattcactggccgtcgttttacaacgtcgtgactgggaaaaccctggcgttacccaacttaatcgccttgcagcacatccccctttcgccagctggcgtaatagcgaagaggcccgcaccgatcgcccttcccaacagttgcgcagcctgaatggcgaatggcaaattgtaagcgttaatattttgttaaaattcgcgttaaatttttgttaaatcagctcattttttaac

SEQ ID NO: 1679 - DNA, 663 bp, Homo sapiens
ggcacgagcttcgctggtgggaagaagccgagatggcggcagccagcgctggggcaacccggctgctcctgctcttgctgatggcggtagcagcgcccagtcgagcccggggcagcggctgccgggccgggactggtgcgcgaggggctggggcggaaggtcgagagggcgaggcctgtggcacggtggggctgctgctggagcactcatttgagatcgatgacagtgccaacttccggaagcggggctcactgctctggaaccagcaggatggtaccttgtccctgtcacagcggcagctcagcgaggaggagcggggccgactccgggatgtggcagcatcctacctggactgcggtgctacgagggcctgcgggcctttgctgtgtgccaccctccctgtaagtctatttaaaaacatcgacgatacattgaaatgtgtgaacgttttgaaaagctacagcttccagcagccaaaagcaactgttgttttggcaagacggtcctgatgtacaagcttgattgaaattcactgctcacttgatacgttattcagaaacccaaggaatggctgtccccatcctcatgtggctgtgtggagctcagctgtgttgtgtggcagtttattaaactgtcccccagataaaaaaaaaaaaaaaaaaa

SEQ ID NO: 1680 - DNA, 663 bp, Homo sapiens; identical to SEQ ID NO: 1679

SEQ ID NO: 1681 - DNA, 1449 bp, Homo sapiens
cggaattcccgggtcgacccacgcgtssgcgacatgggctccgctccctgggccccggtcctgctgctggcgctcgggctgcgcggcctccaggcgggggcccgcagggccccggaccccggcttccaggagcgcttcttccagcagcgtctggaccacttcaacttcgagcgcttcggcaacaagaccttcccycagcgcttcctggtgtcggacaggttctgggtccggggcgaggggcccatcttcttctacactgggaacgagggcgacgtgtgggccttcgccaacaactcgggcttcgtcgcggagctggcggccgagcggggggctctactggtcttcgcggagcaccgctactacgggaagtcgctgccgttcggtgcgcagtccacgcagcgcgggcacacggagctgctgacggtggagcaggccctggccgacttcgcagagctgctccgcgcgctacgacgcgacctcggggcccaggatgcccccgccatcgccttcggtggaagttatggggggatgctcagtgcctacctgaggatgaagtatccccacctggtggcgggggcgctggcggccagcgcgcccgttctagctgtggcaggcctcggcgactccaaccagttcttccgggacgtcacggcggactttgagggccagagtcccaaatgcacccagggtgtgcgggaagcgttccgacagatcaaggacttgttcctacagggagcctacgacacggtccgctgggagttcggcacctgccagccgctgtcagacgagaaggacctgacccagctcttcatgttcgcccggaatgccttcaccgtgctggccatgatggactacccctaccccactgacttcctgggtcccctccctgccaaccccgtcaagggctggtctacaacgcctcgggctccgagcactgctacgacatctaccggctctaccacagctgtgctgaccccactggctgcggcaccggccccgacgccagggcctgggactaccagatctcagagccgccagcaacatcatcttctccaacgggaacctggacccctgggcagggggcgggattcggaggaacctgagtgcctcagtcatcgccgtcaccatccaggggggagcgcaccacctcgacctcagagcctcccacccagaagatcctgcttccgtggttgaggcgcggaagctggaggccaccatcatcggcgagtgggtaaaggcagccaggcgtgagcagcagccagctctgcgtggggggcccagactcagcctctgagcacaggactggaggggtctcaaggctcctcatggagtgggggcttcactcaagcagctggcggcagagggaaggggctgaataaacgcctggaggcctggcaaaaaaaaaaaaaaaaaaaaaaaaaaaaaaaaaaaaaaaaaaagggcggccgc

SEQ ID NO: 1682 - DNA, 1708 bp, Homo sapiens; identical to SEQ ID NO: 1618
  misc_feature (1696)..(1696): n equals a,t,g, or c

SEQ ID NO: 1683 - DNA, 1625 bp, Homo sapiens; identical to SEQ ID NO: 340

SEQ ID NO: 1684 - DNA, 892 bp, Homo sapiens; identical to SEQ ID NO: 1194

SEQ ID NO: 1685 - DNA, 512 bp, Homo sapiens
  misc_feature (35)..(35): n equals a,t,g, or c
  misc_feature (479)..(479): n equals a,t,g, or c
  misc_feature (496)..(496): n equals a,t,g, or c
atcccccgcctgcaggaattcattgacgacgactngttaacgtcgaccaggactccaaaatggcgtcagttgtaccagtgaaggacaagaaacttctggaggtcaaactgggggagctgccaagctggatcttgatgcgggacttcagtcctagtggcattttcggagcgtttcaaagaggttactaccggtactacaacaagtacatcaatgtgaagaaggggagcatctcggggattaccatggtgctggcatgctacgtgctctttagctactccttttcctacaagcatctcaagcacgagcggctccgcaaataccactgaagrggacacactctgcacccccccaccccacgaccttggcccgagcccctccgtgaggaacacaatctcaatcgttgctgaatcctttcatatcctaataggaattaacctccaaataaaacatgactggtaaaaaaaaaaaaaaaaaaaccnaggggggccggtmccanttgccccaaaagggga

SEQ ID NO: 1686 - DNA, 4609 bp, Homo sapiens
gtccccacggccatccccatctaaggtcctgcccacaagcagcagcatagaaaactccaccacctcaagtgtggtccccccaccagccccgccagagccagagcctgggatctccattataattctcctcgtttaccgcaccttagggggactgctccctgcccagttccaggcagaacgccgaggtgccaggcttcctcagaaccccgtcatgaactccccggtggtcagcgtggctgtgttccacggacgcaacttcctaaggggaatcctggagtcccccatcagcctagagtttcgcctgctacagacagcgaatcggagcaaggcgatctgtgtgcagtgggacccacctggcctggcggagcagcatggtgtgtggacagcacgggactgcgagctggtgcacaggaatgggtcccacgcacggtgtcrctgcagccggacagggacctttggggtcctcatggatgcctctccccgtgagaggctggagggcgacctggagctgctggctgtgttcacccacgtggtcgtggctgtgtctgtggctgcgctggtgctgactgcagccatcctgctgagcctgcgcagcctcaagtccaatgtgcgtgggatccatgccaatgtggcagccgccctgrgggtggcagagctcctcttcctgctggggattcacaggacccacaatcagctggtgtgcactgcagtcgccatcctcctgcactacttcttcctcagcaccttcgcgtggctcttcgtgcaggggctgcacctctaccgcatgcaggttgagccacgcaacgtggaccgcggcgccatgcgcttctaccatgccctgggctggggcgtccctgctgtgctgctgggccttgctgtgggcctggaccctgagggctatgggaaccctgacttctgctggatctcagtccacgagcccctcatctggagctttgctggccctgttgtcctggtcatagtgatgaacgggaccatgtttctcctcgctgcccgcacatcctgctccacagggcagagggaggccaagaagacctctgcactgacccttcgcagctccttcctgctgcttctgctggtcagtgcctcctggctctttgggctcctggcagtcaaccacagcatcctagccttccactacctccatgctggactctgcggcctccagggcctggcggtgctgctgctcttctgtgtcctaaatgcagatgctcgggctgcctggatgccagcctgtctgggcaggaaggcagcgcctgaggaggcaaggccagcacctgggctgggacctggggcctacaacaacacggctctctttgaggagagtggcctcatccgcatcactctgggcgcctccaccgtctcctctgtgagcagtgcccgctccggccggacccaggaccaggacagccagcggggccgcagctacctcagggacaatgtcctggttcgacatggctcagccgctgaccacactgaccacagcctccaggctcatgctggccccactgacctggacgtggccatgttccatcgagatgctggcgcagactccgactctgacagtgacctgtccttggaggaggagaggagtctctccattccatcttcagaaagcgaggacaatggccggacgcgggggcgcttccaacggccactctgccgagcagcccagagtgagaggctcctcacccaccccaaagatgtggatggcaatgacctcctgtcctactggccagccctgggggagtgcgaggcagccccctgtgctctgcagacttggggctctgaaaggcgcctggggctggacaccagcaaggatgcagctaacaacaaccagccagacccggccctgaccagtggggatgagacttctctgggccgggcccagcgccagaggaaaggcatcctgaagaaccggttgcaatacccactggtgccacagacccgaggtgcccctgagctgtcctggtgccgtgcagccaccttgggccaccgtgctgtgccagctgcctcttacggtcgcatctatgctggcgggggcacgggcagcctttcacagccagccagccgctactcttctagagaacagctggacctgctcctccggcggcaactgagccgtgagcgactagaggaagcccctgcccctgttctacgtcccctgagccggccagggtcccaggaatgcatggatgctgcaccaggccgactggagcccaaagatcggggcagcaccctgccacggaggcagccacctcgggactaccctggcgccatggctggccgcttcgggtcacgggatgcgctcgacttaggggcacctcgagagtggttgagcacgctgyctccgccccgccgcacccgggaccttgacccacagcccccacctctgcccctgtctccccagcggcaactctcaagggaccccctcttgccatcccggccgctggactctctgtctaggagctcgaactctcgggagcagctggaccaggtgcctagccggcacccctcacgagaagcccttgggccactcccgcagctgctcagagctagggaggactcggtcagtggccccagccatggcccctccacagaacagttggacattctttcctccatccttgcctctttcaactcctcggccctctcctctgtgcaatcttcaagcacacccttgggccctcacaccactgccacaccttctgccacagcctctgtgcttgggccctccacgccacgttctgccacgtctcacagcatctcggagctgtcgccagactcagaagttcccagaagtgagggtcactcctgaggggatgacggcgtggacgaggaacagctgagggcgacagaggatctaggctaacaggagagactccaggagtgggggcagatcccaaggcagcctcctgctccccagtggtgggtgccccagctctacctggtgtggcagggctgaggctccatgtgcatctgtgagcatgcgtgtgacaggtgcagagacgggggactggagggagacttttatacgttttgtacctttgtaaccagagagatgcttatgttatttttcagcttttctgtctcctggggggtttgaggctgggctgggagggggagggagatagagggagagatgcagtttgaccccatttgggtcctgagcaaaccctatgctcatctctctctccttcctggggtggactcagatgggtgggacacatgccttcctccccctattccacccccaagttgatctgagtatcgtcaggggcccaaagtacagaattgttctttgctttttattgaatgctccaaaggccaaacttctggggctgggggttggtcttggaaacaggggtcctctgacttcctcatgggggcttgctcataccgcccctcctggtggatgtgtgtgtttattatgtggagtccctgccacttactgccttatgacctaggactgatgctgtggggtgctggtggagcagctgatgtcgtgtttacagagcaaggcttccctgtctcccacggggaggggctcgggcctctagtcagacattcctgcagagggtcggtggaggggtcattcacctgcccctgcagcaagcaaaagttgtctgtggtgccatttgattccctgacactgccccctgcttgaattgattccgaagggtagggtgggaaggtgagcaaagggagcagaaacaagggaattcaagacccagaatgtaggtgccactgcctcctatgtttacaggatcctccgtggccctaggcacctgggctgcaggaagtgactccgttccactcctcctttattcccttaaaaagggaaaaatgactgttacgaccctgttcacaaaactcttacttttgctattttgtctgctgtccagaactgaagactttaaaattttgttactgtttacaagtccagattcaaaaaatgtttttactttgtttacaactcaaaactttgagttttacactttgtttacagtagataattttttttcctttgtttccaagtgaaaggtagggaaagtgggagagggacttggaggacccacctgtgaggaccctgacctggccatcttgaggggttttctaacccccaggtctcccaggccgaaggtcagccttgagtcccgtttaacagcagatccagaagaccttgagagtaggcgtcctctaaccacgggggagagtggctgtgcagggctggggggtggtctgtgcagacacctcctcacccaccaccccatgcatactcttgggaagcagcttcctgggagattagaaattctacttccctgactggagctaaatcccaccagccaggacccaaactctccttaccgagaaggaccccagctcttgaagggctgagtggcctgctgggggtgggagggtgtctttactatgtcctaggtttcgtagatgcccctctctggggttcccctcctccagcccagcggccctctttcctgtctgtgtaaattgttccgtgaagccgcgctctgttttgggaataaacttctatagaaaacaaaaaaaaaaaaaaaaaaaaaaaaaaaaaata

SEQ ID NO: 1687 - DNA, 959 bp, Homo sapiens
tttttttttttttttttttttctatagaagtttattcccaaaacagagcgcggcttcacggaacaatttacacagacaggaaagagggccgctgggctggaggaggggaaccccagagaggggcatctacgaaacctaggacatagtaaagacaccctcccacccccagcaggccactcagcccttcaagagctggggtccttctcggtaaggagagtttgggtcctggctggtgggatttagctccagtcagggaagtagaatttctaatctcccaggaagctgcttcccaagagtatgcatggggtggtgggtgaggaggtgtctgcacagaccaccccccagccctgcacagccactctcccccgtggttagaggacgcctactctcaaggtcttctggatctgctgttaaacgggactcaaggctgaccttcggcctgggagacctgggggttagaaaacccctcaagatggccaggtcagggtcctcacaggtgggtcctccaagtccctctcccactttccctacctttcacttggaaacaaaggaaaaaaaattatctactgtaaacaaagtgtaaaactcaaagttttgagttgtaaacaaagtaaaaacattttttgaatctggacttgtaaacagtaacaaaattttaaagtcttcagttctggacagcagacaaaatagcaaaagtaagagttttgtgaacagggtcgtaacagtcatttttccctttttaagggaataaaggaggagtggaacggagtcacttcctgcagcccaggtgcctagggccacggaggatcctgtaaacataggaggcagtggcacctacattctgggtcttgaattcccttgtttctgctccctttgctcaccttcccaccctacccttcggaatcaattcaagcagggggcagtgtcagggaatcaaatggcaccacagacctcgtgcc

SEQ ID NO: 1688 - DNA, 462 bp, Homo sapiens
tttttttttttttttttttttttttttgctgcttaatacattttattcaggtctgtcattacacttgcgtgagcattcatgggtgaggttttatttgcaggaggagaaggtcttccagaagaagttcctgcagggcattctgtcccggcgcgcagattgctgggggggtgcgccttcctgccgcctggccacctcccgggcttcctctcctatgaggggcccggcactggcctgggaggtccactcaaaccaccaagcgaggaaagtcaggaggctgcttttccttattcctgccgcttcctgcatatgctcgctgtctcggccggtggggccaccctccaggggcagggcagcggtggccgtggccccggagagcagcagcagcaggaggccgggggacaatggcatcttgtgggctgactggagcttctctcccaccctgctgctgctcttcctcgtgcc

SEQ ID NO: 1689 - DNA, 986 bp, Homo sapiens
gctgcttaatacattttattcaggtctgtcattacacttgcgtgassattcatgggtgaggttttatttgcaggaggagaaggtcttccagaagaagttcctgcagggcattctgtcccggcgcgcagattgctgggggggtgcgccttcctgccgcctggccacctcccgggcttcctctcctatgaggggcccggcactggcctgggaggtccactcaaaccaccaagcgaggaaagtcaggaggctgcttttccttattcctgccgcttcctgcatatgctcgctgtctcggccggtggggccaccctccaggggcagggcagcggtggccgtggccccggagagcagcagcagcaggaggccgggggacaatggcatcttgtgggctgactggagcttctctcccaccctgctgctgctcttccttcctggcagccctgaaatcaatgttttggggacttggktytcttctttggagcttggtgggtattttaagcccaatctcccagctgtttttgtgtctatacatgtctaacgcctggatcytcttccctcttccmtcgcgcagtgacgcagaagctggagcaatcagtgcccacaaaagcgctctggggttggatgtaaccccttaattaaagcttcaggtcttttcctgtgtttagagcgaatttgctcttattttggaacgcatgtgcgcttgcttctggagaagttctgcttcctcgtaattatgcctatagcaggcaggaagccktgagaacaaaaacaagtgatttaacataatataaaattagcctaggataaggagcttgaatgtgaaattgtgcccatgtgaaagtatgactgaaactcatccagtaatttcagagacattcttctactatgggcagagaaacaaggaggcaatgggggctcagagacgctacgatcgtatccgctggtttcacccaattgtcagcaaggaggccccaagaatcgctccc

SEQ ID NO: 1690 - DNA, 3701 bp, Homo sapiens; identical to SEQ ID NO: 679
  misc_feature (1)..(1): n equals a,t,g, or c
  misc_feature (15)..(15): n equals a,t,g, or c
  misc_feature (24)..(24): n equals a,t,g, or c

SEQ ID NO: 1691 - DNA, 508 bp, Homo sapiens
ggcacgaggtgggattgcaggagtgaaccaccatgcctgggcggttttcttttacattggtgatgaatgagcttcactatccgagcatgggaatgttagaaataccacctgtcctttgtatagtgtatttctttttttttttgagatggagcttctctttgtcacccaggctggagtgcagtggcgcgatcttggctcactgcaacctccacctccctggttcaagcgattctcctgcctcagcctcccgagtagctgggattacaggcacctgccaccacgcccggctaatttttgtattaaaaaatttatacaattttcgccacattggccaggctgatcttgaacgccggacctcaccttcgacctcccaaagtgctgggattacaggcatgagccaccatgcccagcctgcctgatatatttctatattttatatatacgtttttctgagatgtagtttcactccagcctgggtgacagcgagactcgtctcagaaaaaaaaaa

SEQ ID NO: 1692 - DNA, 1334 bp, Homo sapiens
  misc_feature (12)..(12): n equals a,t,g, or c
  misc_feature (17)..(17): n equals a,t,g, or c
  misc_feature (19)..(19): n equals a,t,g, or c
  misc_feature (34)..(34): n equals a,t,g, or c
  misc_feature (884)..(884): n equals a,t,g, or c
  misc_feature (1307)..(1307): n equals a,t,g, or c
  misc_feature (1310)..(1311): n equals a,t,g, or c
  misc_feature (1316)..(1316): n equals a,t,g, or c
aattttacacangaaancngtatgacccatgatnacgccaagctcgaaattacccctcactaaagggaacaaaagctggagctccaccgcggtggcgcccgctctagaactagtggatcccccgggctgcaggaattcggcacgaggtgggattgcaggagtgaaccaccatgcctgggcggttttcttttacattggtgatgaatgagcttcactatccgagcatgggaatgttagaaataccacctgtcctttgtatagtgtatttctttttttttttgagatggagcttctctttgtcacccaggctggagtgcagtggcgcgatcttggctcactgcaacctccacctccctggttcaagcgattctcctgcctcagcctcccgagtagctgggattacaggcacctgccaccacgcccggctaatttttgtattaaaaaatttatacaattttcgccacattggccaggctgatcttgaacgccggacctcaccttcgacctcccaaagtgctgggattacaggcatgagccaccatgcccagcctgcctgatatatttctatattttatatatacgtttttctgagatgtagtttcactccagcctgggtgacagcgagactcgtctcagaaaaaaaaaagactcgagggggggcccggtacccaattcgccctatagtgagtcgtattacaattcactggccgtcgttttacaacgtcgtgactgggaaaaccctggcgttacccaacttaatcgccttgcagcacatccccctttcgccagctggcgtaatagcgaagaggcccgcaccgatcgcccttcccaacagttgcgcagcctgaatggcgaatggcaaattgtaagcgttaatattttgntaaaattcgcgttaaatttttgttaaatcagctcattttttaaccaataggccgaaatcggcaaaatcccttataaatcaaaagaatagaccgagatagggttgagtgttgttccagtttggaacaagagtccactattaaagaacgtggactccaacgtcaaagggcgaaaaaccgtctatcagggcgatggcccactacgtgaaccatcaccctaatcaagttttttggggtcgaggtgccgtaaagcactaaatcggaaccctaaagggagccccccgatttagagcttgaccggggaaagccggcgaacgtggcgagaaaggaagggaagaagcgaaaggagcgggccgctagggccgcttggcaagtgtaacggtcacgcttgcgccggaaccaccaacaacccggccgggcttaaangcnncccgnttacaggggccggcggtc

SEQ ID NO: 1693 - DNA, 2105 bp, Homo sapiens
  misc_feature (2096)..(2096): n equals a,t,g, or c
gcggccgctcctacatcagaatggtaacagggcccccgcgcggcagggccctggacccgcgcggctcccggggatggtgagcaaggcgctgctgcgcctcgtgtctgccgtcaaccgcaggaggatgaagctgctgctgggcatcgccttgctggcctacgtcgcctctgtttggggcaacttcgttaatatgaggtctatccaggaaaatggtgaactaaaaattgaaagcaagattgaagagatggttgaaccactaagagagaaaatcagagatttagaaaaaagctttacccagaaatacccaccagtaaagtttttatcagaaaaggatcggaaaagaattttgataacaggaggcgcagggttcgtgggctcccatctaactgacaaactcatgatggacggccacgaggtgaccgtggtggacaatttcttcacgggcaggaagagaaacgtggagcactggatcggacatgagaacttcgagttgattaaccacgacgtggtggagcccctctacatcgaggttgaccagatataccatctggcatctccagcctcccctccaaactacatgtataatcctatcaagacattaaagaccaatacgattgggacattaaacatgttggggctggcaaaacgagtcggtgcccgtctgctcctggcctccacatcggaggtgtatggagatcctgaagtccaccctcaaagtgaggattactggggccacgtgaatccaataggacctcgggcctgctacgatgaaggcaaacgtgttgcagagaccatgtgctatgcctacatgaagcaggaaggcgtggaagtgcgagtggccagaatcttcaacacctttgggccacgcatgcacatgaacgatgggcgagtagtcagcaacttcatcctgcaggcgctccagggggagccactcacggtatacggatccgggtctcagacaagggcgttccagtacgtcagcgatctagtgaatggcctcgtggctctcatgaacagcaacgtcagcagcccggtcaacctggggaacccagaagaacacacaatcctagaatttgctcagttaattaaaaaccttgttggtagcggaagtgaaattcagtttctctccgaagcccaggatgacccacagaaaagaaaaccagacatcaaaaaagcaaagctgatgctggggtgggagcccgtggtcccgctggaggaaggtttaaacaaagcaattcactacttccgtaaagaactcgagtaccaggcaaataatcagtacatccccaaaccaaagcctgccagaataaagaaaggacggactcgccacagctgaactcctcacttttaggacacaagactaccattgtacacttgatgggatgtatttttggcttttttttgttgtcgtttaaagaaagactttaacaggtgtcatgaagaacaaactggaatttcattctgaagcttgctttaatgaaatggatgtgcctaaaagctcccctcaaaaaactgcagattttgccttgcactttttgaatctctctttttatgtaaaatagcgtagatgcatctctgcgtattttcaagtttttttatcttgctgtgagagcatatgttgtgactgtcgttgacagttttatttactggtttctttgtgaagctgaaaaggaacattaagcgggacaaaaaatgccgattttatttataaaagtgggtacttaataaatgagtcgttatactatgcataaagaaaaatcctagcagtattgtcaggtggtggtgcgccggcattgattttagggcagataaaagaattctgtgtgagagctttatgtttctcttttaattcagagtttttccaaggtctacttttgagttgcaaacttgactttgaaatattcctgttggtcatgatcaaggatatttgaaatcactactgtgttttgctgcgtatctggggcgggggcaggttggggggcacaaagttaacatattcttggttaaccatggttaaatatgctattttaataaaatattgaaactcacaaaaaaaaaaaaaaaaactcgagggggggcccgtacccaattcgccnaacagaagc

SEQ ID NO: 1694 - DNA, 1162 bp, Homo sapiens
  misc_feature (13)..(13): n equals a,t,g, or c
  misc_feature (47)..(47): n equals a,t,g, or c
  misc_feature (51)..(51): n equals a,t,g, or c
  misc_feature (75)..(75): n equals a,t,g, or c
  misc_feature (1029)..(1029): n equals a,t,g, or c
  misc_feature (1033)..(1033): n equals a,t,g, or c
  misc_feature (1074)..(1074): n equals a,t,g, or c
  misc_feature (1155)..(1155): n equals a,t,g, or c
  misc_feature (1160)..(1160): n equals a,t,g, or c
gacccatgatttnccgcccaagctcgaaattaacccctcagctaaangggnccaaaagctggaagcttcccaccngcgggtggcgccgcttctagaactaaggggatccccccggggctgcaggaattcggcacgagtgaagtttgatgtcatacgtatcatttcattacattactttttattgccaaataattcattatatggatatgtcacattttatttattcataagttgatggaaatttggattgtcccacttcttggttatgaatgttgctacactaaacatttgtggacacatttttgtgtggacatatgtttttatttttctggattatgtactcaggaatggaattgctgccttaatatggcaactctgtttagctttttgaggaactgccaaactgtttaccaaagtggttgtaccattttctgttttgttcagcagtatataaagggtccaatttcttcgcattttggctatcacttgttattacatgtctttctgatgatagtcattgtagtgagtgtgaattatttcattatggctttgatttttctcagatgactaatgatattgagcatcttttcatatagtttttgatcatttacatatcttctttggagaaatgtctattcaaatcctttrcccatgwtttaawtgggtwatttatcttttaattattgagttgtaagggttctttagatattctagatataattttcttgccagatataatttgcaaatattttctcccattcagagtgttgttttttcacttcattgatcttgtctttgaagcagaaaagtttttaattttgatgaagaagtccaagttatctattttttctttcttttttttatttgtttgtttttttgtgacacagtcttgctctgtcgctgaggctggagtgcagtggcgtgatcttggcttttgcaacctccacctcctgggttaaagcaattcccctgcctcagcctcccaagtagctgggactgcaggtgtgtgccactacacctcgctaattnttgnatttctttttttttagtagagatagggttttgccatgttgnccaggctggtctcgagggggggcccggtacccaattcgccctatagcgacccgtactacaatttcactggccgccctttancaacncc

SEQ ID NO: 1695 - DNA, 2376 bp, Homo sapiens
  misc_feature (7)..(7): n equals a,t,g, or c
  misc_feature (130)..(130): n equals a,t,g, or c
  misc_feature (178)..(178): n equals a,t,g, or c
  misc_feature (2116)..(2116): n equals a,t,g, or c
  misc_feature (2267)..(2267): n equals a,t,g, or c
  misc_feature (2347)..(2347): n equals a,t,g, or c
  misc_feature (2370)..(2370): n equals a,t,g, or c
  misc_feature (2374)..(2374): n equals a,t,g, or c
caatacncaagccgcctctcaacgcgcgttgccgattcattaatgcagctggcacgacaggtttcccgactggaaagcgggcagtgagcgcaacgcaattaatgtgagttagctcactcattaggcaccncaggctttacactttatgcttccggctcgtatgttgtgtggaattgtnagcggataacaatttcacacaggaaacagctatgaccatgattacgccaagctcgaaattaaccctcactaaagggaacaaaagctggagctccaccgcggtggcggccgctctagaactagtggatcccccgggctgcaggaattcggcacgagggacaacgactatctgctacatggtcatagacctcccatgccctcctttcgggcttgcttcaagagcatcttccgcattcatacagaaactggcaacatctggacccatctgcttggtttcgtgctgtttctctttttgggaatcttgaccatgctcagaccaaatatgtacttcatggcccctctacaggagaaggtggtttttgggatgttctttttgggtgcagtgctctgcctcagcttctcctggctctttcacaccgtctattgtcattcagagaaagtctctcggactttttccaaactggactattcagggattgctcttctaattatggggagctttgtcccctggctctattattccttctactgctccccacagccacggctcatctacctctccatcgtctgtgtcctgggcatttctgccatcattgtggcgcagtgggaccggtttgccactcctaagcaccggcagacaagagcaggcgtgttcctgggacttggcttgagtggcgtcgtgcccaccatgcactttactatcgctgagggctttgtcaaggccaccacagtgggccagatgggctggttcttcctcatggctgtgatgtacatcactggagctggcctttatgctgctcgaattcctgagcgcttctttcctggaaaatttgacatatggttccagtctcatcagattttccatgtcctggtggtggcagcagcctttgtccacttctatggagtctccaaccttcaggaattccgttacggcctagaaggcggctgtactgatgacacccttctctgagccttcccacctgcggggtggaggaggaacttcccaagtgcttttaaaaataacttctttgctgaagtgagaggaagagtctgagttgtctgtttctagaagaaacctcttagagaattcagtaccaaccaagcttcagcccactttcacacccactgggcaataaactttccatttccattctcctagctggggatggggcatggtcaaacttagccatcccctcctcagcaaggcatctaccggcccctcacagagacagtactttgaaactcatgttgagattttaccctctcctccaaccattttgggaaaattatggactgggactcttcagaaattctgtcttttcttctggaagaaaatgtccctcccttacccccatccttaactttgtatcctggcttataacaggccatccatttttgtagcacacttttcaaaaacaattatataccctggtcccatctttctagggcctggatctgcttatagagcaggaagaataaagccaccaacttttacctagcccggctaatcatggaagtgtgtccaggcttcaagtaacttgagttttaattttttttttttcttggcagagtaatgtaaaatttaaatggggaaagatatttaatatttaatactaagctttaaaaagaaacctgctatcattgctatgtatcttgatgcaaagactatgatgttaataaaagaaagtacagaagasacttggcattcaaaraaaaaaaaaaaaaaaaaactcgagggggggcccggtacccaattcgccctatagtgagtcgtattacaattcactggccgtcgttttacaacgtcgtgactgggaaaaccctggcgttacccaacttaatcgccttgcagcacatccccctttcgccagctggcgtaatagcgaagaggcccgcaccgatcgcccttcccaacagttgcgcagcctgaatggcgaanggcaaattgtaagcgttaatattttgttaaaattcgcgttaaatttttgttaaatcagctcattttttaaccaataggccgaaatcggcaaaatcccttataaatcaaaagaatagaccgagatagggttgagtgttgttccagtttggancaagagtccactattaaagaacgtggactccaacgtcaaagggcgaaaaaccgtctatcagggcgatggcccctacgggnccatcaccctaatcccgcttttngggncc

SEQ ID NO: 1696 - DNA, 1153 bp, Homo sapiens
aggtgcctsccacaacacatggggattatgggacctacaattcaaggtgagatttgggtggggacacagcaaaaccatatcaaggggaaacctgctatcattgacttttctctcrtatatgctagggaccagagctttctctctgtgggcagtcagcttgctgcccgcttcacctgggtttgccccagaccctgctgtccccaaagttagaggcaactcagaaggtcacacagaacaagtgacactgagcatcagttcactgccatcaggccagggcctgccttcaaatcccaaatctgtcttttacttactgcgtgaawtttcttacctcactgccattgattcctcatgtgaaagtggggataccattctgcagtggaaccatgctgtgagcakgagtggggtgaatattgaaggcctaccacatggtgagcaccaaaaaatagtagccactaatagactaacatgggggtgtgcatattcagacagttctcccaagactttgtccatgaaatgtttctggagcaagaaaggtagggtttttattcttctcaccaagagattccactgacaactctcctgtgttggtgagggattgggaatgggtagagttagtttactgagcctgctataacaaagttctacagactgggtgatttaaccaaaagaagtttattttctcacaattccaggagctagaagactgagatcaaggtgtcggcaggattggtttcttctgaggccttgcttcttggcttgtagatgtcagacttctctccatgtcttcttatggtctttcctctgaatgtctgtgttttcatttcctcttcttataaagatgtgagtcgctgggcacggtggctcacgcctgtaatcccagcactttgggaggctgaggcgggtggatcacgaggtcagaagatcgaggccatcctggccaacatggtgaaacccatctctactaaaaatacgaaaattagctgggtgtggtggtgtgcacctgtaaccccagctactcgggagaccgaggcaggagaatcacttgaacccaggtggcagagattgcagtgagctgagattgcgccactgcactccagcctggcgacagagtggagactccgtcttaataaaaaaaaaaaaaaaaaaactcgta

SEQ ID NO: 1697 - DNA, 1050 bp, Homo sapiens
ggcacgagccactatggacagagcctccactgagctgctgcctgcccgccacatacccagctgacatgggcaccgcaggagccatgcagctgtgctgggtgatcctgggcttcctcctgttccgaggccacaactcccagcccacaatgacccagacctctagctctcagggaggccttggcggtctaagtctgaccacagagccagtttcttccaacccaggatacatcccttcctcagaggctaacaggccaagccatctgtccagcactggtaccccaggcgcaggtgtccccagcagtggaagagacggaggcacaagcagagacacatttcaaactgttccccccaattcaaccaccatgagcctgagcatgagggaagatgcgaccatcctgcccagccccacgtcagagactgtgctcactgtggctgcatttggtgttatcagcttcattgtcatcctggtggttgtggtgatcatcctagttggtgtggtcagcctgaggttcaagtgtcggaagagcaaggagtctgaagatccccagaaacctgggagttcagggctgtctgaaagctgctccacagccaatggagagaaagacagcatcacccttatctccatgaagaacatcaacatgaataatggcaaacaaagtctctcagcagagaaggttctttaaaagcaactttgggtccccatgagtccaaggatgatgcagctgccctgtgactacaaggaggaagagatggaattagtagaggcaatgaaccacatgtaaattattttattgtttcatgtctgcttctagatctaaaggacactagcattgccccagatctgggagcaagctaccaacaggggagactctttcctgtatggacagctgctgtggaaatactgcctgcttctcccacctcctcagagccacaggaaagaggaggtgacagagagagagcaaggaaagtgatgaggtggattgatactttctactttgcattaaaattattttctagcctgcaaaaaaaaaaaaaaaaaaaaaaaaaaaa

SEQ ID NO: 1698 - DNA, 1275 bp, Homo sapiens
gattttttgtatttttagtagagacaggctttttccatgttgcccaggctggtctcgaactcctgggctcaagtracccgcccgcctcagcctcccagtgttgggattacaagcatgaactattgcgcctggctcctcgtttctcttaattccactcttcattccactctaatctggtttttgtccttactactctgcaaaaacttctgtggacaaagtttcagtaacttccatattgctgtttcagtggttatcttacctgatctgtcaggagaaattcttaaaattgattattctgtctttctgacacactttatttactttttgtccagaataccatactcttggttttcttgccacctgtgctctggttgctctctttgtctcctttgctagttcttactcctctctccgcctcttaatgttggatatctaaaacctcaggcttgggtctccatctttatgtatcacttctctcacagtgatctcatccaataacaggttttaaaacccatctgtattctgatgacttcaagtttttattttctgataggccttttaaattctagatttccatattggactgcctattcaacattttcatatgaatgtataatagatatgttaaatgtaatacatctaaaaccagtctcacaagctttccttaataagcctgtcaaatcttcttttattctagttgatggtagtgccacacttactggacaaaagccttaaagtcatgctttactcccattttctcatatctcagatgcttactgttaggaagtcctgttagtaccaccttttgggcatctaaaattgaaccacttctcatacctcctacctccattgctatcacctcagtccaagtcaccatcagtgcttcctaatcctacacccagttttaacccttgccccttataatatatkctcaacatagtaatgagggagattttaaaatgtaaataagattatgacacttcaggccaggtgcggtggatcacacctgtaatcacagcactttgggaggccgaakcgggcggatcacaaggtcacgagttagagaccagcctggccgacatggtgaaaccccgtctctactaaaatacaaaaattagctgagcgtggtggtgcacacctgtaatcccagctagggcaggagaattgcttgaacccaggaggcagaggttgcagtgagcygagatcgccccattgtactccagcctgggcagtagagtaagactccatctcaaaaaaaaaaaaaaaaaactcgag

SEQ ID NO: 1699 - DNA, 764 bp, Homo sapiens
gcccacgcgtccgcccacgcgtccgcccacgcgtccgggtggcatgtcggtcaggcacagcagggtcctgtgtccgcgctgagccgcgctctgccctgctccagcaaggaccatgagggcgctggaggggccaggcctgtcgctgytgtgcctggtgttggcgctgcctgccctgctgccggtgccggctgtacgcggagtggctgaaacacctacatatccatggagagatgctgaaacaggagaaaggctggtgtgtgctcagtgtcctcctggaacatttgtgcaaaggccttgtaggcgcgattctcctacgacgtgtggcccttgccctcctaggcactatacacagttttggaactatctcgagcgctgtaggtattgcaacgtgctctgtggagaaagggaagaggaagcaagggcttgtcatgcaacacacaacagggcatgtaggtgtcgcacaggcttctttgctcatgctggattttgtctggaacacgcttcttgtcctcctggtgctggagtgatcgctcctggtacaccctctcagaacacccaatgccagccctgtcctcctggcaccttctctgcatctagctccagctctgaacaatgccaacctcaccgcaattgtacagctctgggactggctctgaacgtgcctggttcctcctcccatgatactctgtgtacaagctgtactggctwtcctctctctacccgcgtgcctggcgctgaagagtgcgaacgcgctgtgatcgact

SEQ ID NO: 1700 - DNA, 2110 bp, Homo sapiens; identical to SEQ ID NO: 856
  misc_feature (2104)..(2104): n equals a,t,g, or c

SEQ ID NO: 1701 - DNA, 1179 bp, Homo sapiens
acccacgcgtccgcccacgcgtccgcccacgcgtccgcccacgcgtccgggtggcatgtcggtcaggcacagcagggtcctgtgtccgcgctgagccgcgctctccctgctccagcaaggaccatgagggcgctggaggggccaggcctgtcgctgctgtgcctggtgttggcgctgcctgccctgctgccggtgccggctgtacgcggagtggcagaaacacccacctacccctggcgggacgcagagacaggggagcggctggtgtgcgcccagtgccccccaggcacctttgtgcagcggccgtgccgccgagacagccccacgacgtgtggcccgtgtccaccgcgccactacacgcagttctggaactacctggagcgctgccgctactgcaacgtcctctgcggggagcgtgaggaggaggcacgggcttgccacgccacccacaaccgtgcctgccgctgccgcaccggcttcttcgcgcacgctggtttctgcttggagcacgcatcgtgtccacctggtgccggcgtgattgccccgggcacccccagccagaacacgcagtgccagccgtgccccccaggcaccttctcagccagcagctccagctcagagcagtgccagccccaccgcaactgcacggccctgggcctggccctcaatgtgccaggctcttcctcccatgacaccctgtgcaccagctgcactggcttccccctcagcaccagggtaccaggagctgaggagtgtgagcgtgccgtcatcgactttgtggctttccaggacatctccatcaagaggctgcagcggctgctgcaggccctcgaggccccggagggctggggtccgacaccaagggcgggccgcgcggccttgcagctgaagctgcgtcggcggctcacggagctcctgggggcgcaggacggggcgctgctggtgcggctgctgcaggcgctgcgcgtggccaggatgcccgggctggagcggagcgtccgtgagcgcttcctccctgtgcactgatcctggccccctcttatttattctacatccttggcaccccacttgcactgaaagaggcttttttttaaatagaagaaatgaggtttcttaaagcttatttttataaagctttttcataaaaaaaaaaaaaaaaaaaaaaaaaaaaaaaaaaaa

SEQ ID NO: 1702 - DNA, 1635 bp, Homo sapiens; identical to SEQ ID NO: 1199
  misc_feature (6)..(6): n equals a,t,g, or c
  misc_feature (24)..(24): n equals a,t,g, or c
  misc_feature (34)..(34): n equals a,t,g, or c
  misc_feature (1615)..(1615): n equals a,t,g, or c
  misc_feature (1630)..(1630): n equals a,t,g, or c

SEQ ID NO: 1703 - DNA, 1796 bp, Homo sapiens
  misc_feature (149)..(149): n equals a,t,g, or c
tgtttgtcggtgcagycctcgccgtggcgggcgtgctgatacaggggattgtgcgcaaccctctggcatcaccggatattctcggtgttaaccatgccgccagcctggcctctgtgggggctctacttcttatgccgtcactgcccgtnatggtgctgccgctgctggcctttgcgggcggcatggcggggttgatattgctgaagatgctggcaaagacccaccagccgatgaagctggcgctcaccggcgtggcgctttctgcatgctgggccagcctgacggattatctgatgctctcgcgcccgcaggatgtgaacaacgccctgctgtggctgaccggcagcttatggggccgtgactggagctttgtgaagattgccatcccgctgatgattttatttctgccgctgagcctgagtttttgccgcgatctcgacctccttgcactcggcgatgcgcgcgccaccacgctcggtgtgtcggtgccccatacccgattctgggctttgttactagctgtcgccatgacatctaccggcgtggccgcctgcggcccgattagctttattggtctcgtggtgccgcatatgatgcgtagcatcaccggtggacgtcaccgcagactgctgcctgtttcggccctgacaggtgcgttgctgttggtggttgccgatctgctggcgagaattattcatcccccactggagctcccggttggcgtgctgaccgccattatcggtgcgccgtggtttgtctggttgcttgtgagaatgcgataaatgactttacgaactgaaaatctgacggtcagttacgggacagacaaggtacttaacgacgtttcactctcactgccaacggggaagatcaccgccctgatcggtcctaacggttgcgggaaatcgacgctgttaaactgtttttcgcggcttttaatgccgcagtctggcaccgtatttctcggcgataatcccataaatatgctctcatcgcgccagttggcccgcaggctttcgctgctgcctcagcaccatttaacgccagaggggatcacagtccaggagctggtttcgtatggtcgtaatccctggctgtcactctgggggcgtctctccgctgaagacaatgcacgagttaatgtcgccatgaaccagacccggatcaatcatcttgccgttcgtcggttaaccgagctttccggcggtcagcgccagcgcgcatttctggcaatggtcctggcccagaatacgcccgttgtattacttgatgagccaaccacctatcttgatatcaatcaccaggtggacctgatgcggttgatgggcgaactccggactcaggggaaaacggtggtcgctgtgctgcacgaccttaatcaggctagccggtactgcgatcaactggtggtaatggcaaacggacatgttatggcgcaaggcacaccagaagaggtgatgaccccaggattgctgagaacagtattcagcgtggaagcggaaatacaccccgagccggtatctggcaggccgatgtgcctaatgaggtagattgcacaggccgtaagaaccaaaccacgactgaatgaaactggactggcgccagcaagcctgttcagactggggctgaacttttccggactctgaaagattaccaatactcatcgtccatccctggttaacacttcggcgagtggatggcgaaaaacgacaaaactcagttgcgtatttccgaaaccgaaaaatatgcccacgttactttcttcttcaacggtggcgtagaagagtcgttcaaag

SEQ ID NO: 1704 - DNA, 681 bp, Homo sapiens
  misc_feature (385)..(385): n equals a,t,g, or c
  misc_feature (444)..(444): n equals a,t,g, or c
  misc_feature (555)..(555): n equals a,t,g, or c
tacggctgcgagaagacgacagaaggggagacgcgcctctgcatctgcgccaggcgaacgggtcctgcgcctcctgcagtcccagctctccaccgccgcgtgcgcctgcagacgctccgctcgctgccttctctcctggcaggcgctgccttttctccccgttaaagggcacttgggctgaaggatcgctttgagatctgaggaacccgcagcgctttgagggacctgaagctgtttttcttcgttttcctttgggttcagtttgaacgggaggtttttgatccctttttttcagaatggattatttgctcatgattttctctctgctgtttgtggcttgccaaggagctccagaaacagcagtcttaggcgctgagctcagcgnggtgggtgagaacggcggggagaaacccactcccagtccaccctggcggctccgcggtnccaagcgctgctcctgctcgtccctgatggataaagagtgtgtctacttctgccacctgggacatcatttgggtcaacactcccgagcacgttgttccgtatggacttggnaagccctaggtccaagagagccttggagaatttacttcccacaaaggcaacagaccgtgagaatagatgccaatgtgctagccaaaaagacaagaagtgctggrattttttgccaascaggaaaag

SEQ ID NO: 1705 - DNA, 2064 bp, Homo sapiens
  misc_feature (2020)..(2020): n equals a,t,g, or c
ggcaactcgagaggcctgcgcgggtgggagggatgcccgggacagaggatgagacactgagggcaaaaagaggctccgcagcgaggacgggaggtcgtccgggggcccaccatgctggtgactgcctaccttgcttttgtaggcctcctggcctcctgcctggggctggaactgtcaagatgccgggctaaaccccctggaagggcctgcagcaatccctccttccttcggtttcaactggacttctatcaggtctacttcctggccctggcagctgattggcttcaggccccctacctctataaactctaccagcattactacttcctggaaggtcaaattgccatcctctatgtctgtggccttgcctctacagtcctctttggcctagtggcctcctcccttgtggattggctgggtcgcaagaattcttgtgtcctcttctccctgacttactcactatgctgcttaaccaaactctctcaagactactttgtgctgctagtggggcgagcacttggtgggctgtccacagccctgctcttctcagccttcgaggcctggtatatccatgagcacgtggaacggcatgacttccctgctgagtggatcccagctacctttgctcgagctgccttctggaaccatgtgctggctgtagtggcaggtgtggcagctgaggctgtagccagctggatagggctggggcctgtagcgccctttgtggctgccatccctctcctggctctggcaggggccttggcccttcgaaactggggggagaactatgaccggcagcgtgccttctcaaggacctgtgctggaggcctgcgctgcctcctgtcggaccgccgcgtgctgctgytgggcaccatacaagctctatttgagagtgtcatcttcatctttgtcttcctctggacacctgtgctggacccacacggggcccctctgggcattatcttctccagcttcatggcagccagcctgcttggctcttccctgtaccgtatcgccacctccaagaggtaccaccttcagcccatgcacctgctgtcccttgctgtgctcatcgtcgtcttctctctcttcatgttgactttctctaccagcccaggccaggagagtccggtggagtccttcatagcctttctacttattgagttggcttgtggattatactttcccagcatgagcttcctacggagaaaggtgatccctgagacagagcaggctggtgtactcaactggttccgggtacctctgcactcactggcttgcctagggctccttgtcctccatgacagtgatcgaaaaacaggcactcggaatatgttcagcatttgctctgctgtcatggtgatggctctgctggcagtggtgggactcttcaccgtggtaaggcatgatgctgagctgcgggtaccttcacctactgaggagccctatgcccctgagctgtaaccccactccaggacaagatagctgggacagactcttgaattccagctatccgggattgtacagatctctctgtgactgactttgtgactgtcctgtggtttctcctgccattgctttgtgtttgggaggacatgatgggggtgatggactggaaagaaggtgccaaaagttccctctgtgttactcccatttagaaaataaacacttttaaatgatcaaaaaaaaaaaaaaaaagggcggccgctctagaggatccctcgaggggcccaagcttacgcgtgcatgcgacgtcatagctctctccctatagtgagtcgtattataagctaggcactggccgtcgttttacaacgtcgtgactgggagatctgctagcttgggatctttgtgaaggaaccttacttctgtggtgtgacataattggacaaactacctacagagatttaaagctctaaggtaaatataaaatttttaagtgkataatggggtaaactaagctgcatatgcttgctgcttgagagttttgcttactgagtatgattatgaaaatattatncmcagagctagggatctaaatggtggggattttaaaatcacaag

SEQ ID NO: 1706 - DNA, 1433 bp, Homo sapiens
  misc_feature (1371)..(1371): n equals a,t,g, or c
  misc_feature (1384)..(1384): n equals a,t,g, or c
  misc_feature (1389)..(1389): n equals a,t,g, or c
  misc_feature (1411)..(1411): n equals a,t,g, or c
  misc_feature (1413)..(1413): n equals a,t,g, or c
gggcggcggccagaggsctgcccggctcccggaagcaggctgtgaggggcgggagcgctgctggaacccgagccggagccggagccacagcggggagggtggcctggcggcctggagccggacgtgtccggggcgtccccgcagaccggggcagcaggtcgtccgggggcccaccatgctggtgactgcctaccttgcttttgtaggcctcctggcctcctgcctggggctggaactgtcaagatgccgggctaaaccccctggaagggcctgcagcaatccctccttccttcggtttcaactggacttctatcaggtctacttcctggccctggcagctgattggcttcaggccccctacctctataaactctaccagcattactacttcctggaaggtcaaattgccatcctctatgtctgtggccttgcctctacagtcctctttggcctagtggcctcctcccttgtggattggctgggtcgcaagaattcttgtgtcctcttctccctgacttactcactatgctgcttaaccaaactctctcaagactactttgtgctgctagtggggcgagcacttggtgggctgtccacagccctgctcttctcarccttcgaggcctggtatatccatgarcacgtggaacggcatgacttccctgctgartggatcccagctacctttgctcgagctgccttctggaaccatgtgctggctgtagtggcaggtgtggcagctgaggctgtagccagctggatagggctggggcctgtagcgccctttgtggctgccatccctctcctggctctggcaggggccttggcccttcgaaactggggggagaactatgaccggcagcgtgccttctcaaggacctgtgctggaggcctgcgctgcctcctgtcggaccgccgcgtgctgctgctgggcaccatacaagctctatttgagagtgtcatcttcatctttgtcttcctctggacacctgtgctggacccacacggggcccctctgggcattatcttctccagcttcatggcagccagcctgcttggctcttccctgtaccgtatcgccacctccaagaggtaccaccttcagcccatgcacctgctgtcccttgctgtgctcatcgtcgtcttctctctcttcatgwgactttctctaccagcccaggccaggagagtccggtggaagtccttcatagcctttctacttattgagttggcttgtggattatactttcccagcatgagcttcctacggagaaaggtgatcctgagcagacaagctgtgtactcaactggttccgggtaccttgactactgcttgctagggttcttgtctcatgacaggatcgaaaaagnactcggaatgtanatttnttgtgcatgtatgcttctgcangnggactttaccggtaagatat

SEQ ID NO: 1707 - DNA, 1709 bp, Homo sapiens
ggcacgagtggaacccgagccggagccggagccacagcggggagggtggcctggcggcctggagccggacgtgtccggggcgtccccgcagaccggggcagcaggtcgtccgggggcccaccatgctggtgactgcctaccttgcttttgtaggcctcctggcctcctgcctggggctggaactgtcaagatgccgggctaaaccccctggaagggcctgcagcaatccctccttccttcggtttcaactggacttctatcaggtctacttcctggccctggcagctgattggcttcaggccccctacctctataaactctaccagcattactacttcctggaaggtcaaattgccatcctctatgtctgtggccttgcctctacagtcctctttggcctagtggcctcctcccttgtggattggctgggtcgcaagaattcttgtgtcctcttctccctgacttactcactatgctgcttaaccaaactctctcaagactactttgtgctgctagtggggcgagcacttggtgggctgtccacagccctgctcttctcagccttcgaggcctggtatatccatgagcacgtggaacggcatgacttccctgctgagtggatcccagctacctttgctcgagctgccttctggaaccatgtgctggctgtagtggcaggtgtggcagctgaggctgtagccagctggatagggctggggcctgtagcgccctttgtggctgccatccctctcctggctctggcaggggccttggcccttcgaaactggggggagaactatgaccggcagcgtgccttctcaaggacctgtgctggaggcctgcgctgcctcctgtcggaccgccgcgtgctgctgctgggcaccatacaagctctatttgagagtgtcatcttcatctttgtcttcctctggacacctgtgctggacccacacggggcccctctgggcattatcttctccagcttcatggcagccagcctgcttggctcttccctgtaccgtatcgccacctccaagaggtaccaccttcagcccatgcacctgctgtcccttgctgtgctcatcgtcgtcttctctctcttcatgttgactttctctaccagcccaggccaggagagtccggtggagtccttcatagcctttctacttattgagttggcttgtggattatactttcccagcatgagcttcctacggagaaaggtgatccctgagacagagcaggctggtgtactcaactggttccgggtacctctgcactcactggcttgcctagggctccttgtcctccatgacagtgatcgaaaaacaggcactcggaatatgttcagcatttgctctgctgtcatggtgatggctctgctggcagtggtgggactcttcaccgtggtaaggcatgatgctgagctgcgggtaccttcacctactgaggagccctatgcccctgagctgtaaccccactccaggacaagatagctgggacagactcttgaattccagctatccgggattgtacagatctctctgtgactgactttgtgactgtcctgtggtttctcctgccattgctttgtgtttgggaggacatgatgggggtgatggactggaaagaaggtgccaaaagttccctctgtgttactcccatttagaaaataaacacttttaaatgatcaaaaaaaaaaaaaaaaa

SEQ ID NO: 1708 - DNA, 649 bp, Homo sapiens; identical to SEQ ID NO: 362

SEQ ID NO: 1709 - DNA, 649 bp, Homo sapiens; identical to SEQ ID NO: 362

SEQ ID NO: 1710 - DNA, 2079 bp, Homo sapiens
  misc_feature (1273)..(1273): n equals a,t,g, or c
  misc_feature (1342)..(1342): n equals a,t,g, or c
  misc_feature (1494)..(1494): n equals a,t,g, or c
  misc_feature (2060)..(2062): n equals a,t,g, or c
  misc_feature (2075)..(2075): n equals a,t,g, or c
  misc_feature (2077)..(2077): n equals a,t,g, or c
ggcacgagccaacatccagtcctgctgactatttgacccccacaacaatgggtatccttaatasaggagctgcttgttgtttgttgacagcttggaaagggaagatcttatgccttttcttttctgttttcttctcagtcttttcagtttcatcatttgcacaaacttgtgagcatcaragggctgatggattccaaaccaggacactaccctgagatctgcacagtcagaaggacggcaggagtgtcctggctgtgaatgccaaagccattctccccctctttgggcagtgccatggatttccactgcttcttatggtggttggttgggttttttggttttgkttttttttttaagtttcactcacatagccaactctcccaaagggcacacccctggggctgagtctccwggccccccaactgtggtagctccagcgatggtgctgcccaggcctcycggtgctccatytccgcctccacactgaccaagtgctggcccacccagtccatgctccagggtcaggcggagctgctgagtgacagctttcctcaaaaagcagaaggagagtgagtgcctttccctcctaaagctgaatcccggcggaaagcctctgtccgcctttacaagggagaagacaacagaaagagggacaagagggttcacacagcccagttcccgtgacgaggctcaaaaacttgatcacatgcttgaatggagctggtgagatcaacaacactacttccctgccggaatgaactgtccgtgaatggtctctgtcaagcgggccatctcccttggcccagagacggagtgtgggagtgattcccaactcctttctgcagacgtctgccttggcatcctcttgaataggaagatcgttccaccttctacgcaattgacaaacccggaagatcagatgcaattgctcccatcagggaagaaccctatacttggtttgctacccttagtatttattactaacctcccttaagcagcaacagcctacaaagagatgcttggagcaatcagaacttcaggtgtgactctagcaaggctcatctttctgcccggctacatcagccttcaagaatcagaagaaaggscaaggtgctggactgttactgacttggatcccaaagcaaggagatcatttggagctcttgggtcagagaaaatgagaaaggacagagccagcggytccaactcctttcagccacatgccccaggctctcgctgccctgtggacaggatgaggacagagggcacatgnacagcttgccagggatgggcagcccaacagcacttttcctcttctagatgcaccccagcatttaagtgnccttctgatcttggaaaaacagcgtcttccttctttatctatagcaactcattggtggtagccatcaagcacttcccaggatctgctccaacagaatattgctaggttttgctacatgacgggttgtgagacttctgtttgatcactgtganaccaacccccatctccctagcccacccccctccccaactccctctctgtgcattttctaagtgggacattcaaaaaactctctcccaggacctcggatgaccatactcagacgtgtgacctccatactgggctaaggaagtatcagcactagaaattgggcagtcttaatgttgaatgctgctttctgcttagtatttttttgattcaaggctcaraaggaatggtgcgtggcttccctgtcccagttgtggcaactaaaccaatcggtgtgttcttgatgcgggtcaacatttccaaaagtggctagtcctcacttctagatctcagccattctaactcatatgttcccaattaccaaggggtggccgggcacagtggctcacgcctgtaatcccagcactttgagaggctgaggtggtaggatcacctgaggtcaggagttcaagaccagcctgtccaacatggtgaaacccccatctctactaaaaataccaaaaattagccgagcgtagtgacgggtgcccgtaatcccagctactcagaaggctragagagtatttccgtnnngtcccccgtagancncg

SEQ ID NO: 1711 - DNA, 1057 bp, Homo sapiens; identical to SEQ ID NO: 355

SEQ ID NO: 1712 - DNA, 707 bp, Homo sapiens
  misc_feature (696)..(696): n equals a,t,g, or c
  misc_feature (698)..(698): n equals a,t,g, or c
  misc_feature (705)..(705): n equals a,t,g, or c
aaaaaaaaaaaaaaaagaacgcccttttactgtcctcatcatcccagtttgaggcagtgctggagtggggaaggccgtcttagaccatagaggttggaagacgctgagagatcatccagcccagccccttgatgttacagagcagaagacagatgcccaaacaggagaaggcacttgcccacggtcatacggcaggttgccacaaaaccaagatggcagcccttcctcagcgtgcctcactgccactcccagagccagggagccccataaaacccacatcatgtcttaagagtatatctggctccttgaccagcaatcggccctgggagccaccaggtgggaaaagcgcctctgccagagtccaggccttgggatgacagacagcttgcccgcacactcgggccccactcaaggatgtagggccttttctggcccctgacccctccctggcatgggagcgtggggacggggctggccttgggaggagcggcaggggcatcacctccttctgctgcttctccctgctcctaccctcaagggcctgggggctgcccagctgcctctatgcccttctgggggtctcagcccactgctgacacttctgcaatccagagaaacactaaataaagcaatacgtgtttgccaaaaaaaaaaaaaaaaaaactcgagggggggcccgtacccaatcgcctgtangncggtatntc

SEQ ID NO: 1713 - DNA, 510 bp, Homo sapiens
ggatgattaaggaaaagtgaaagctggaaaagtagactgtcaggcttatgctcagactgcccagaaagctgggatcagggcctatccaactgttaaattttatttctacgaaagagcaaagagaaattttcaagaagagcagataaataccagagatgcaaaagcaatcgctgccttaataagtgaaaaattggaaactctccgaaatcaaggcaagaggaataaggatgaactttgataatgttgaagatgaagaaaaagtttaaaagaaattctgacagatgacatcagaagacacctatttagaatgttacatttatgatgggaatgaatgaacattatcttagacttgcagttgtactgccagaattatctacagcactggtgtaaaagaagggtctgcaaactttttctgtaaagggccggtttataaatattttagactttgcaggctataatatatggttcacacatgagaacaaaaaaaaaaaaaaaaaaaaaaaaactcga

SEQ ID NO: 1714 - DNA, 1050 bp, Homo sapiens; identical to SEQ ID NO: 1697

SEQ ID NO: 1715 - DNA, 442 bp, Homo sapiens
ttttttttttttttttggcaaacacgtattgctttatttagtgtttctctggattgcagaagtgtcagcagtgggctgagacccccagaagggcatagaggcagctgggcagcccccaggcccttgagggtaggagcagggagaagcagcagaaggaggtgatgcccctgccgctcctcccaaggccagccccgtccccacgctcccatgccagggaggggtcaggggccagaaaaggccctacatccttgagtggggcccgagtgtgcgggcaagctgtctgtcatcccaaggcctggactctggcagaggcgcttttcccacctggtggctcccagggccgattgctggtcaaggagccagatatactcttaagacatgatgtgggttttatggggctccctggctctgggagtggcagtgaggcacgctgaggaaggct

SEQ ID NO: 1716 - DNA, 1690 bp, Homo sapiens
ctgtaggaattcggcagagaggaaaagggaaggaggagactgagtgattaagtcacccactgtgagagctggtcttctatttaatgggggctctctctgcccaggagtcagaggtgcctccaggagcagcaggagcatggccgaggatctgggactgagctttggggaaacagccagtgtggaaatgctgccagagcacggcagctgcaggcccaaggccaggagcagcagcgcacgctgggctctcacctgctgcctggtgttgctccccttccttgcaggactcaccacatacctgcttgtcagccagctccgggcccagggagaggcctgtgtgcagttccaggctctaaaaggacaggagtttgcaccttcacatcagcaagtttatgcacctcttagagcagacggagataagccaagggcacacctgacagttgtgagacaaactcccacacagcactttaaaaatcagttcccagctctgcactgggaacatgaactaggcctggccttcaccaagaaccgaatgaactataccaacaaattcctgctgatcccagagtcgggagactacttcatttactcccaggtcacattccgtgggatgacctctgagtgcagtgaaatcagacaagcaggccgaccaaacaagccagactccatcactgtggtcatcaccaaggtaacagacagctaccctgagccaacccagctcctcatggggaccaagtctgtatgcgaagtaggtagcaactggttccagcccatctacctcggagccatgttctccttgcaagaaggggacaagctaatggtgaacgtcagtgacatctctttggtggattacacaaaagaagataaaaccttctttggagccttcttactataggaggagagcaaatatcattatatgaaagtcctctgccaccgagttcctaattttctttgttcaaatgtaattataaccaggggttttcttggggccgggagtagggggcattccacagggacaacggtttagctatgaaatttggggcccaaaatttcacacttcatgtgccttactgatgagagtactaactggaaaaaggctgaagagagcaaatatattattaagatgggttggaggattggcgagtttctaaatattaagacactgatcactaaatgaatggatgatctactcgggtcaggattgaaagagaaatatttcaacaccttcctgctatacaatggtcaccagtggtccagttattgttcaatttgatcataaatttgcttcaattcaggagctttgaaggaagtccaaggaaagctctagaaaacagtataaactttcagaggcaaaatccttcaccaatttttccacatactttcatgccttgcctaaaaaaaatgaaaagagagttggtatgtctcatgaatgttcacacagaaggagttggttttcatgtcatctacagcatatgagaaaagctacctttcttttgattatgtacacagatatctaaataaggaagtatgagtttcacatgtatatcaaaaatacaacagttgcttgtattcagtagagttttcttgcccacctattttgtgctgggttctaccttaacccagaagacactatgaaaaacaagacagactccactcaaaatttatatgaacaccactagatacttcctgatca

SEQ ID NO: 1717 - DNA, 1918 bp, Homo sapiens
  misc_feature (14)..(14): n equals a,t,g, or c
  misc_feature (29)..(29): n equals a,t,g, or c
  misc_feature (33)..(33): n equals a,t,g, or c
  misc_feature (38)..(38): n equals a,t,g, or c
  misc_feature (40)..(40): n equals a,t,g, or c
gggggggacggggngggaaacacttcctnctantttangngacccacccattaaactataccttatagtaaaccagtatcccaagctgcttttagttccaaaaatagtttcttttccaaaggttgttgctctactttgtaggaagtctttgcatatggccctcccaactttaaagtcataccagagtggccaagagtgtttatcccaacccttccatttaacaggatttcactcacatttctggaactagctatttttcagaagacaataatcagggcttaattagaacaggctgtatttcctcccagcaaacagttgtggccacactaaaaacaatcatagcattttacccctggattatagcacatctcatgttttatcatttggatggagtaatttaaaatgaattaaattccagagaacaatggaagcattgcctggcagatgtcacaacagaataaccacttgtttggagcctggcacagtcctccagcctgatcaaaaattattctgcatagttttcagtgtgctttctgggagctatgtacttcttcaatttggaaacttttctctctcatttatagtgaaaatacttggaagttactttaagaaaaccagtgtggcctttttccctctagctttaaaagggccgcttttgctggaatgctctaggttatagataaacaattaggtataatagcaaaaatgaaaattggaagaatgcaaaatggatcagaatcatgccttccaataaaggcctttacacatgttttatcaatatgattatcaaatcacagcatatacagaaaagacttggacttattgtatgtttttattttatggctctcggcctaagcacttctttctaaatgtatcggagaaaaaatcaaatggactacaagcacgtgtttgctgtgcttgcaccccaggtaaacctgcattgtagcaatttgtaaggatattcagatggagcactgtcacttagacattctctgggggattttctgcttgtctttcttgagctttttggaaggataattctgataaggcactcaagaaacgtacaaccacagtgctttcttcaaatcatatgagaaatactatgcatagcaaggagatgcagagccgccaggaaaattctgagttccagcacaattttctttggaatctaacaggaatctagcctgaggaagaagggaggtctccatttctatgtctggtatttgggggttttgtttgtttttgctttagcttggtgaaaaaaagttcactgaacaccaagaccagaatggatttttttaaaaaaatagatgttccttttgtgaagcaccttgattccttgattttgattttttgcaaagttagacaatggcacaaagtcaaaatgaaatcaatgtttagttcacaagtagatgtaatttactaaagaatgatacacccatatgctatatacagcttaactcacagaactgtaaaagaaaattataaaataattcaacatgtccatctttttagtgataataaaagaaagcatggtattaaactatcatagaagtagacagaaaaagaaaaaaggactcatggcattattaatataattagtgctttacatgtgttagttatacatattagaagcatatttgcctagtaaggctagtagaaccacatttcccaaagtgtgctccttaaacactcatgccttatgattttctaccaaaagtaaaaagggttgtattaagtcagaggaagatgcctctccattttccctctctttatcagaggttcacatgcctgtctgcacattaaaagctctgggaagacctgttgtaaagggacaagttgaggttgtaaaatctgcatttaaataaacatctttgatcacaaaaaaaaaaaaaaaaaaaaaaaaaaaaaaaaaaaa

SEQ ID NO: 1718 - DNA, 1572 bp, Homo sapiens; identical to SEQ ID NO: 111

SEQ ID NO: 1719 - DNA, 1402 bp, Homo sapiens
ggcacgagcccggtcggtagtcgtcgccccagcccgccgggggcgcagcgcccgagccgcggccctcgagacgggaccgagagcatcatgggcagcactgtcccgcgctccgcctccgtgctgcttctgctgctgctcctgcgccgggccgagcagccctgcggggccgagctcaccttcgagctgccggacaacgccaagcagtgcttccacgaggaggtggagcagggcgtgaagttctccctggattaccaggtcatcactggaggccactacgatgttgactgctatgtagaggacccccaggggaacaccatctacagagaaacgaagaagcagtacgacagcttcacgtaccgggctgaagtcaagggcgtttatcagttttgcttcagtaatgagttttccaccttctctcacaagaccgtctactttgactttcaagtgggcgatgagcctcccattctcccagacatggggaacagggtcacagctctcacccagatggagtccgcctgcgtgaccatccatgaggctctgaaaacggtgattgactcccagacgcattaccggctgcgggaggtccaggaccgggcccgagcggaagaccttaatagccgagtctcttactggtctgttggcgagacgattgccctgttcgtggtcagcttcagtcaggtgctactgttgaaaagcttcttcacagaaaaacgacccatcagcagggcagtccactcctagccccggcatcctgctctagggcccctcatgccccaggctggagcagctctcctaggtcacagcctgctgggctgggtcgcgtagcccagggtggaggcagaacgatgctgctgtggtagccctttgcctttcatgcccatgcttgattcttgcacctcagcagctgaaggtctcagagcccagtaatcagaaggcatccgactgcattaagtgtgcagcgctgaaaagacatttacaactaggccagggattagccactgtgggagggtggacaggcaatggttcagtggcctggctgttggcaggaactccaagtgcccaggcctcttgggcagcttagggccctgcctctgtttcatgatgcatgggtcatttgtcttgggtgtcctatcccatatggagaagaaaggggctctaagttctggctcttctttctttggggttctctgtacctgaggaaaccaggccctgggtgactttgcagatctgctcaccctcggtgagcaacagtgtcagccatgcaagcaggacagaatggtgactgggtgcccttggtgagctgtgtatttcctaggaggtagaaaactgtgggaaactgtggctaataaaaactaagtgtgagcgtcctggaaaaaaaaaaaaaaaaaaaaaaaaaaaaaaa

SEQ ID NO: 1720 - DNA, 1681 bp, Homo sapiens
  misc_feature (1290)..(1290): n equals a,t,g, or c
  misc_feature (1602)..(1602): n equals a,t,g, or c
  misc_feature (1647)..(1647): n equals a,t,g, or c
  misc_feature (1651)..(1651): n equals a,t,g, or c
  misc_feature (1673)..(1673): n equals a,t,g, or c
atacgccaagctcgaaattaaccctcactaaagggaacaaaagctggagctccaccgcggtggcggccgctctagaactagtggwtcccccgggctgcaggaattcggcacgagcctgaatgtcgaagactctacttttgtctataaaacactatataaatgaattttaataaatttttgcttyagcacttggccccattgtagattgccctgtgcagtaaactttcaaggtgtcrgctgccccagattgcttcatttgctgggtgtggaaagagttgctatggccaggcatatgggatttggaagctcagcagaagtgacttctgctctgtggttgctgctccccggctttcacagacatggtatggcagccattcttttatctatttaaccaagaggatgctggggaattgtgctgcttgtcctgttggctggtggctgcattatgtcctggggtgtgcatgtgggtctatttagagcttctgtcccttccttcccattgcaagttgcacccagatgagacagctgtagtactaggtctctttcacctctcattgcctgtccctgcttcgagctggttgtcttgtgcgtgggacatgggccttcctatctgtgttttctcaaagtcaggagctgaccaggagcacactaaggtgtggtcatgcatcataaccaacattcactcatctgggacattcttaagatacatttataaatcatttcagcagtagtactttgtatgtgttgagagtttacagagctctttgacatacgcgatcttagtctttacaaataaggaaaacagctcagtttgggaagtatcagagatgggattcaaacccagatcctctggtccaagttgtatgtgcactgaactaatcaggcaggaaaaaagcccagccactgtctcacagattgttttttgtatattgtagcaaaatcctgaaacaatggggtccttccagtctcatcatacaaaatggcaatcttggctgggtgcggtggttcatgcctataatcccagtgctttacaaggctgaggcaggaggctctcttgagaataggagttcaagaccagcctgggcaacatagcaagatcctgtctctccaaaaaaaaaaaaaaaaaaaaaaactcgagggggggcccggtacccaattcgccctatagtgagtcgtattacaattcactggccgtcgttttacaacgtcgtgactgggaaaaccctggcgttacccaacttaatcgccttgcagcacatccccctttcgccagctggcgtaatagcgaanaggcccgcaccgatcgcccttcccaacagttgcgcagcctgaatggcgaatggcaaattgtaagcgttaatattttgttaaaattcgcgttaaatttttgttaaatcagctcattttttaaccaataggccgaaatcggcaaaatcccttataaatcaaaagaatagaccgagatagggttgagtgktgttccagtttggaacaagagtccactattaaagaacgtggactccaacgtcaaagggcgaaaaaccgtctatcagggcgatggcccactacgtgaaccatcaccctaatcaagttttttggggncgaggtgccgaaagcctaaatcggaccctaaagggagcccccganttanagcttgacggggaaagccggcnaacgtggc

SEQ ID NO: 1721 - DNA, 294 bp, Homo sapiens
  misc_feature (1)..(1): n equals a,t,g, or c
nggcgctgctctaaccacattcctctctgggacattcttaagatacatttataaatcatttcagcagtagtactttgtatgtgttgagagtttacagagctctttgacatacgcgatcttagtctttacaaataaggaaaacagctcagtttgggaagtatcagagatgggattcaaacccagatcctctggtccaagttgtatgtgcactgaactaatcaggcaggaaaaaagcccagccactgtctcacagattgttttttgtatattgtagcaaaatcctgaaacaatggg

SEQ ID NO: 1722 - DNA, 1104 bp, Homo sapiens
  misc_feature (1100)..(1100): n equals a,t,g, or c
attgggcgggctgccacggcatggagaatggctccgcttctgttgcagctggcggtgctcggcgcggcgctggcggccgcagccctcgtactgatttccatcgttgcatttacaactgctacaaaaatgccagcactccatcgacatgaagaagagaaattcttcttaaatgccaaaggccagaaagaaactttacccagcatatgggactcacctaccaaacaactttctgtcgttgtgccttcatacaatgaagaaaaacggtaaacgagatcctgcgttcacttatgaagtgatagtagttgatgatggcagtaaagatcagacctcaaaggtagcttttaaatattgccagaaatatggaagtgacaaagtacgtgtgataaccctggtgaagaatcgtggaaaaggtggagcgattagaatgggtatattcagttctcgaggagaaaagatccttatggcagatgctgatggagccacaaagtttccagatgttgagaaattagaaaaggggctaaatgatctacagccttggcctaatcaaatggctatagcatgtggatctcgagctcatttagaaaaagaatcaattgctcagcgttcttacttccgtactcttctcatgtatgggttccactttctggtgtggttcctttgtgtcaaaggaatcagggacacacagtgtgggttcaaattatttactcgagaagcagcttcacggacgttttcatctctacacgttgaacgatgggcatttgatgtagaactactgtacatagcacagttctttaaaattccaatagcagaaattgctgtcaactggacagaaattgaaggttctaaattagttccattctggagctggctacaaatgggtaaagacctactttttatacgacttcgatatttgactggtgcctggaggcttgagcaaactcggaaaatgaattaggttgtttgcagtcttcagttgtgttcttatgcttcagtgtcacatttcatttcatttgaaactaaaattttaagtaaagctgaaataaacttctaaaaaaaaaaaaaaaaaaagggcggccgttttaaagaatccaagttttacnaccc

SEQ ID NO: 1723 - DNA, 1075 bp, Homo sapiens
gccacggcatggagaatggctccgcttctgttgcagctggcggtgctcggcgcggcgctggcggccgcagccctcgtactgatttccatcgttgcatttacaactgctacaaaaatgccagcactccatcgacatgaagaagagaaattcttcttaaatgccaaaggccagaaagaaactttacccagcatatgggactcacctaccaaacaactttctgtcgttgtgccttcatacaatgaagaaaaacggtaaacgagatcctgcgttcacttatgaagtgatagtagttgatgatggcagtaaagatcagacctcaaaggtagcttttaaatattgccagaaatatggaagtgacaaagtacgtgtgataaccctggtgaagaatcgtggaaaaggtggagcgattagaatgggtatattcagttctcgaggagaaaagatccttatggcagatgctgatggagccacaaagtttccagatgttgagaaattagaaaaggggctaaatgatctacagccttggcctaatcaaatggctatagcatgtggatctcgagctcatttagaaaaagaatcaattgctcagcgttcttacttccgtactcttctcatgtatgggttccactttctggtgtggttcctttgtgtcaaaggaatcagggacacacagtgtgggttcaaattatttactcgagaagcagcttcacggacgttttcatctctacacgttgaacgatgggcatttgatgtagaactactgtacatagcacagttctttaaaattccaatagcagaaattgctgtcaactggacagaaattgaaggttctaaattagttccattctggagctggctacaaatgggtaaagacctactttttatacgacttcgatatttgactggtgcctggaggcttgagcaaactcggaaaatgaattaggttgtttgcagtcttcagttgtgttcttatgcttcagtgtcacatttcatttcatttgaaactaaaattttaagtaaagctgaaataaacttcttgtcattgtcaaaaaaaaaaaaaaaaaaaaaaaaaaaa

SEQ ID NO: 1724 - DNA, 538 bp, Homo sapiens
  misc_feature (442)..(442): n equals a,t,g, or c
  misc_feature (488)..(488): n equals a,t,g, or c
gtttcacaatcctgctgctccctgttctgatattgatcgtgaagaagactgtggaaataagagttcagtgaattctacagtcttggtgaagaacacgaagaagactaatccagagatgaaagaaaaaccctgccattttgaaagatgtgaaggggaggtgaacacacgcttcagcctaaaacactaaaaacacatttactccccaataattgtacgggaggtgatcgaggaagaagaaccaagtgaaaaatcagaggccacctacatgaccatgcacccagtttggccttctctgaggtcagatcggaacaactcacttgaaaaaaagtcaggtgggggaatgccaaaaacacagcaagccttttgagaagaatggagagtcccttcatctcagcagcggtgggagactctctcctgtgtgtgtyctgggscactctaccantgawttcaramtccccgtctcccagttgtccyccygtctcatggtnggggcaataccctgaaaatggaaaattgggacctgggcaaaaaaaatgga

SEQ ID NO: 1725 - DNA, 2931 bp, Homo sapiens
  misc_feature (651)..(651): n equals a,t,g, or c
  misc_feature (2904)..(2905): n equals a,t,g, or c
  misc_feature (2912)..(2912): n equals a,t,g, or c
caaagcacgtgtttggtttgctctgagcctaacctagatgctcgcagcagtctttcagttgagcttggggactgcagctgtggggagatttcagtgcattgcctcccctgggtgctcttcatcttggatttgaaagttgagagcagcatgttttgcccactgaaactcatcctgctgccagtgttactggattattccttgggcctgaatgacttgaatgtttccccgcctgagctaacagtccatgtgggtgattcagctctgatgggatgtgttttccagagcacagaagacaaatgtatattcaagatagactggactctgtcaccaggagagcacgccaaggacgaatatgtgctatactattactccaatctcagtgtgcctattgggcgcttccagaaccgcgtacacttgatgggggacawcttatgcaatgatggctctctcctgctccaagatgtgcaagaggctgaccagggaacctatatctgtgaaatccgcctcaaaggggagagccaggtgttcaagaaggcggtggtactgcatgtgcttccagaggagcccaaagagctcatggtccatgtgggtggattgattcagatgggatgtgttttccagagcacagaartgaaacacgtgaccaaggtnagaatggatattttcaggacggcgcgcaaaggargagattgtatttcgttactaccacaaactcaggatgtctgcggagtactcccagagctggggccacttccagaatcgtgtgaacctggtgggggacattttccgcaatgacggttccatcatgcttcaaggagtgagggagtcagatggaggaaactacacctgcagtatccacctagggaacctggtgttcaagaaaaccattgtgctgcatgtcagcccggaagagcctcgaacactggtgaccccggcagccctgaggcctctggtcttgggtggtaatcagttggtgatcattgtgggaattgtctgtgccacaatcctgctgctccctgttctgatattgatcgtgaagaagacctgtggaaataagagttcagtgaattctacagtcttggtgaagaacacgaagaagactaatccagagataaaagaaaaaccctgccattttgaaagatgtgaaggggaggtgaacacacgcttcagcctaaaacactaagtagatgcaggcctgggccgttctcatacccccgggaaccatatcttacccattgtatgtcgcagcttgcaggccagtgcttggcacagagcagggactcaggaagcctttgtcactaaagtaagagcctctgcggagtacagtgcatggggtcggctgggccagccccaggcagcagatcctggtattgggctgaggaaagagcactgcgcttggagtcagtaagatctgccacctccctgagtctcatcagcaaaatgaggataaagataaagatactatagttgcccagcctgcttgacagggttgttgtaaggttcacataagatgatgatatgcaaatgctttgtaatctaggaggtgctatttgtctaaagtctaatggagaattataatacatccaggagttaaggagttctaatgcttaaaatgaaatagtctaagatcttagcaagaaaggattaagaaggacttttctctccatattgattttgtaatggagttataaataattgcttctagagactgagaaattgattggttttctttaactcctattctttcttttctttctttaatttttaaaaaactctttgaatagttacctttctctattttgggctgtttttgtcccaagagtaggattttttcccagtagagtgcagtggtccaagaatgggccactggatgatactgctttaccamcgagtgacaggaccatgaacctcacagttgtgaggttcaatgagggctggcccttccacataaatcctctgagggagatgatgacaattcactgctgattaatgccattctgcctttactgtaattagaaggaaataaccccagaatacaaggaatttagcaagataaggaacccctgctgctacctaaacatccatctaaacaaagatgtttggcttttgaagcaaagagtttggttcttaagactgtgttctttgacagttaattttcaagaagactgaagactgaattatcattgttgagaattcttaggtctcagtaaccctctgaaccagcagtttgggtggtcgatgcccagcaaataggagtgggtggccttttctctggtgtataagattcatctaatttttaggaatttttgtaccattttccccctctagaaacacatttactccccaataattgtacgggaggtgatcgaggaagaagaaccaagtgaaaaatcagaggccacctacatgaccatgcacccagtttggccttctctgaggtcagatcggaacaactcacttgaaaaaaagtcaggtgggggaatgccaaaaacacagcaagccttttgagaagaatggagagtcccttcatctcagcagcggtggagactctctcctgtgtgtgtcctgggccactctaccagtgatttcagactcccgctctcccagctgtcctcctgtctcattgtttggtcaatacactgaagatggagaatttggagcctggcagagagactggacagctctggaggaacaggcctgctgaggggaggggagcatggacttggcctctggagtgggacactggccctgggaaccaggctgagctgagtggcctcaaaccccccgttggatcagaccctcctgtgggcagggttcttagtggatgagttactgggaagaatcagagataaaaaccaacccaaatcaaaaaaaaaaaaaaaaaactcgagggggggmccgganngccattncaggaggaattcttagctg

SEQ ID NO: 1726 - DNA, 1574 bp, Homo sapiens; identical to SEQ ID NO: 374

SEQ ID NO: 1727 - DNA, 3583 bp, Homo sapiens
  misc_feature (3)..(3): n equals a,t,g, or c
  misc_feature (5)..(5): n equals a,t,g, or c
  misc_feature (3532)..(3532): n equals a,t,g, or c
  misc_feature (3546)..(3546): n equals a,t,g, or c
  misc_feature (3570)..(3570): n equals a,t,g, or c
  misc_feature (3581)..(3581): n equals a,t,g, or c
ttngntttsgattaccaattatcgatgatggttgagatgtgtataagagasaggtctacagctggtcggagtctcaggaccaggtcttcctacgctggagcagcggggagacagccaccatgcacatcctcgtggtccatgccatggtgatcctgctgacgctgggcccgcctcgagccgacgacagcgagttccaggcgctgctggacatctggtttccggaggagaagccactgcccaccgccttcctggtggacacatcggaggaggcgctgctgcttcctgactggctgaagctgcgcatgatccgttctgaggtgctccgcctggtggacgccgccctgcaggacctggagccgcagcagctgctgctgttcgtgcagtcgtttggcatccccgtgtccagcatgagcaaactcctccagttcctggaccaggcagtggcccacgacccccagactctggagcagaacatcatggacaagaattacatggcccacctggtggaggtccagcatgagcgcggcgcctccggaggccagactttycactccttgctcacagcctycctgccgccccgccgagacagcacagaggcacccaaaccaaagagcagcccagagcagcccataggccagggccggattcgggtggggacccagctccgggtgctgggccctgaggacgacctggctggcatgttcctccagattttcccgctcagcccggaccctcggtggcagagctccagtccccgccccgtggccctcgccctgcagcaggccctgggccaggagctggcccgcgtcgtccagggcagccccgaggtgccgggcatcacggtgcgtgtcctgcaggccctcgccaccctgctcagctccccacacggcggtgccctggtgatgtccatgcaccgtagccacttcctggcctgcccgctgctgcgccagctctgccagtaccagcgctgtgtgccacaggacaccggcttctcctcgctcttcctgaaggtgctcctgcagatgctgcagtggctggacagccctggcgtggagggcgggcccctgcgggcacagctcaggatgcttgccagccaggcctcagccgggcgcaggctcagtgatgtgcgaggggggctcctgcgcctggccgaggccctggccttccgtcaggacctggaggtggtcagctccaccgtccgtgccgtcatcgccaccctgaggtctggggagcagtgcagcgtggagccggacctgatcagcaaagtcctccaggggctgatcgaggtgaggtccccccacctggaggagctgctgactgcattcttctctgccactgcggatgctgcctccccgtttccagcctgtaagcccgttgtggtggtgagctccctgctgctgcaggaggaggagcccctggctggggggaagccgggtgcggacggtggcagcctggaggccgtgcggctggggccctcgtcaggcctcctagtggactggctggaaatgctggaccccgaggtggtcagcagctgccccgacctgcagctcaggctgctcttctcccggaggaagggcaaaggtcaggcccaggtgccctcgttccgtccctacctcctgaccctcttcacgcatcagtccagctggcccacactgcaccagtgcatccgagtcctgctgggcaagagccgggaacagaggttcgacccctctgcctctctggacttcctctgggcctgcatccatgttcctcgcatctggcaggggcgggaccagcgcaccccgcagaagcggcgggaggagctggtgctgcgggtccagggcccggagctcatcagcctggtggagctgatcctggccgaggcggagacgcggagccaggacggggacacagccgcctgcagcctcatccaggcccggctgcccctgctgctcagctgctgctgtggggacgatgagagtgtcaggaaggtgacggagcacctgtcaggctgcatccagcagtggggagacagcgtgctgggcaggcgctgccgagaccttctcctgcagctctacctacagcggccggagctgcgggtgcccgtgcctgaggtcctactgcacagcgaaggggctgccagcagcagcgtctgcaagctggacggactcatccaccgcttcatcacgctccttgcggacaccagcgactcccgggcgttggagaaccgaggggcggatgccagcatggcctgccggaagctggcggtggcgcacccgctgctgctgctcaggcacctgcccatgatcgcggcgctcctgcacggccgcacccacctcaacttccaggagttccggcagcagaaccacctgagctgcttcctgcacgtgctgggcctgctggagctgctgcagccgcacgtgttccgcagcgagcaccagggggcgctgtgggactgccttctgtccttcatccgcctgctgctgaattacaggaagtcctcccgccatctggctgccttcatcaacaagtttgtgcagttcatccataagtacattacctacaatgccccagcagccatctccttcctgcagaagcacgccgacccgctccacgacctgtccttcgacaacagtgacctggtgatgctgaaatccctccttgcagggctcagcctgcccagcagggacgacaggaccgaccgaggcctggacgaagagggcgaggaggagagctcagccggctccttgcccctggtcagcgtctccctgttcacccctctgaccgcggccgagatggccccctacatgaaacggctttcccggggccaaacggtggaggatctgctggaggttctgagtgacatagacgagatgtcccggcggagacccgagatcctgagcttcttctcgaccaacctgcagcggctgatgagctcggccgaggagtgttgccgcaacctcgccttcagcctggccctgcgctccatgcagaacagccccagcattgcagccgctttcctgcccacgttcatgtactgcctgggcagccaggactttgaggtggtgcagacggccctccggaacctgcctgagtacgctctcctgtgccaagagcacgcggctgtgctgctccaccgggccttcctggtgggcatgtacggccagatggaccccagcgcgcagatctccgaggccctgaggatcctgcatatggaggccgtgatgtgagcctgtggcagccgacccccctccaagccccggcccgtcccgtccccggggatcctcgaggcaaagcccaggaagcgtgggcgttgctggtctgtccgaggaggtgagggcgccgagccctgaggccaggcaggcccaggagcaatactccgagccctggggtggctccgggccggccgctggcatcaggggccgtccagcaagccctcattcaccttctgggccacagccctgccgcggagcggcggatccccccgggcatggcctgggctggttttgaatgaaacgacctgaactgtcaaaaaaaaaaaaaaaaaaacttnagggggggcccggncccaatttgccctttagggggccnattaaaaattnaa

SEQ ID NO: 1728 - DNA, 1352 bp, Homo sapiens
cggacgcgtgggcagcgactcccgggcgttggagaaccgaggggcggatgccagcatggcctgccggaagctggcggtggcgcacccgctgctgctgctcaggcacctgcccatgatcgcggcgctcctgcacggccgcacccacctcaacttccaggagttccggcagcagaaccacctgagctgcttcctgcacgtgctgggcctgctggagctgctgcagccgcacgtgttccgcagcgagcaccagggggcgctgtgggactgccttctgtccttcatccgcctgctgctgaattacaggaagtcctcccgccatctggctgccttcatcaacaagtttgtgcagttcatccataagtacattacctacaatgccccagcagccatctccttcctgcagaagcacgccgacccgctccacgacctgtccttcgacaacagtgacctggtgatgctgaaatccctccttgcagggctcagcctgcccagcagggacgacaggaccgaccgaggcctggacgaagagggcgaggaggagagctcagccggctccttgcccctggtcagcgtctccctgttcacccctctgaccgcggccgagatggccccctacatgaaacggctttcccggggccaaacggtggaggatctgctggaggttctgagtgacatagacgagatgtcccggcggagacccgagatcctgagcttcttctcgaccaacctgcagcggctgatgagctcggccgaggagtgttgccgcaacctcgccttcagcctggccctgcgctccatgcagaacagccccagcattgcagccgctttcctgcccacgttcatgtactgcctgggcagccaggactttgaggtggtgcagacggccctccggaacctgcctgagtacgctctcctgtgccaagagcacgcggctgtgctgctttccgkgccttcctggtgggcatgtacggccagatggaccccagcgcgcagatytccgaggccctgaggatcctgcatatggaggccgtgatgtgagcctgtggcarccgacccccctccaagccccggcccgtyccgtccccggggatcctcgaggcaaarcccaggaagcgtgggcgttgctggtctgtccsaggaggtgagggcgccgarccctgaggccaggcaggcccaggagcaatwctccgagccctggggtggctccgggccggccgctggcatcaggggccgtccagcaagccctcattcmccttttgggccccagccctgccgcggarcggcggatccccccgggcatggcctgggctggttttgaatgaaacgacctgaactgtcaaaaaaaaaaaaaa

SEQ ID NO: 1729 - DNA, 451 bp, Homo sapiens
  misc_feature (441)..(443): n equals a,t,g, or c
  misc_feature (445)..(445): n equals a,t,g, or c
ccggtccggaattcccgggtcgacccacgcgtccgatgaaatggattttggtatttggaaagggcatttggatgccctaactgctgatgtgaaggrgaaaatgtataacgtcttgttgtttgttgatggagggtggatggtggatgttagagaggatgccaaagaagaccatgaaagaacacatcaaatggtcttactgagaaagctttgtctgccaatgttgtgttttctgcttcatacgatattgcacagtactggtcagtatcaggaatgcctacagttagcagatatggtatcctctgagcgccacaaactgtacctggtattttctaaggaagagctcccaccctaaggggcacacactgagttgcttatgccacttccttgttcaaaataaagtaactgccttaatcttaaaaaaaaaaaaaaaaaaaaaaaaannnanaaagaa

SEQ ID NO: 1730 - DNA, 2159 bp, Homo sapiens
  misc_feature (592)..(592): n equals a,t,g, or c
ggaggaacagacttacctcagcaaccctggcacctccaacccgacacatgctactgctgctgctactgctgccacccctgctctgtgggagagtgggggctaaggaacagaaggattacctgctgacaatgcagaagtccgtgacggtgcaggagggcctgtgtgtctctgtgctttgctccttctcctacccccaaaatggctggactgcctccgatccagttcatggctactggttccgggcaggggaccatgtaagccggaacattccagtggccacaaacaacccagctcgagcagtgcaggaggagactcgggaccgattccacctccttggggacccacagaacaaggattgtaccctgagcatcagagacaccagagagagtgatgcagggacatacgtcttttgtgtagagagaggaaatatgaaatggaattataaatatgaccagctctctgtgaatgtgacagcgtcccaggacctactgtcaagatacaggctggaggtgccagagtcggtgactgtgcaggagggtctgtgtgtctctgtgccctgcagtgtcctttacccccattacaactggactgnctctagccctgtttatggatcctggttcaaggaaggggccgatataccatgggatattccagtggccacaaacaccccaagtggaaaagtgcaagaggatacccagggtcgattcctcctccttggggacccacagaccaacaactgctccctgagcatcagagatgccaggaagggggattcagggaagtactacttccaggtggagagaggaagcaggaaatggaactacatatatgacaagctctctgtgcatgtgacagccctgactcacatgcccaccttctccatcccggggaccctggagtctggccaccccaggaacctgacctgctctgtgccctgggcctgtgaacaggggacgccccccacgatcacctggatgggggcctccgtgtcctccctggaccccactatcactcgctcctcgatgctcagcctcatcccacagccccaggaccatggcaccagcctcacctgtcaggtgaccttgcctggggccggcgtgaccatgaccagggctgtccgactcaacatatcctatcctcctcagaacttgaccatgactgtcttccaaggagatggcacagcatccacaaccttgaggaatggctcggccctttcagtcctggagggccagtccctgcaccttgtctgtgctgtcgacagcaatccccctgccaggctgagctggacctgggggagcctgaccctgagcccctcacagtcctcgaaccttggggtgctggagctgcctcgagtgcatgtgaaggatgaaggggaattcacctgccgagctcagaaccctctaggctcccagcacatttccctgagcctctccctgcaaaacgagtacacaggcaaaatgaggcctatatcaggagtgacgctaggggcattcgggggagctggagccacagccctggtcttcctgtacttctgcatcatcttcgttgtagtgaggtcctgcaggaagaaatcggcaaggccagcagtgggcgtgggggatacaggcatggaggacgcaaacgctgtcaggggctcagcctctcagggacccctgattgaatccccggcagatgacagccccccacaccatgctccgccagccctggccaccccctccccagaggaaggagagatccagtatgcatccctcagcttccacaaagcgaggcctcagtacccacaggaacaggaggccatcggctatgagtactccgagatcaacatccccaagtgagaaactgcagagactcaggcctgtttgagggctcacgacccctgcagcaaagaagcccgagactgattcctttagaattaacagccctccatgctgtgcaacaggacatcagaacttattcctcttgtcaaactgaaaatgcgtgcctgatgaccaaactctccctttctccatccaatcggtccacactccccgcccccggcctctggtacccaccattctcttctctacttctctgaggtcgactattttaggttccaaatatagtgagatcgtagagtgtttgtctctctgtacctggcttatttcactcaacataatgtt

SEQ ID NO: 1731 - DNA, 759 bp, Homo sapiens
  misc_feature (19)..(19): n equals a,t,g, or c
  misc_feature (743)..(743): n equals a,t,g, or c
  misc_feature (757)..(757): n equals a,t,g, or c
  misc_feature (759)..(759): n equals a,t,g, or c
ttaaatggtctcacaaaancagataaatatttgcacagatgggtgtgctaatcattgtgccttgatggttccacgatgtatccgggtgtggaaatctcactgggtctctctcaaggccactcggctactcaggacagggctggaatttaaagcctgtccgattctgaggtctcttctctcatctagcactgagtcaagcaatcagcaggctgggcaccccttagccataagttttcaggaaataaattccttgagggcattgacttttacaaaagagggagcagcaatggcctagagtctcaggaacaagacaggtgcactgaggagatgaaggccgggaccccctgcccaacctgtatggcgggtctgtacttattttgtttacccccaatttaaaacgtttttttttattgcaggttgtttgtttgatatggtttggctgtgtccccacccaaatcttatctagaattgtaatcagaattataatccccatgtgttgggggagggacctggtgggaggtgataggatcatgggggtggttcccccatgctgttctgatagtgagtgagttatcacgagatctgatggttttgtaagtggtggtttcccctgctcttctctcttgcctgccaccatgtaagatgtgcctggttccccttccgccatgattgtaagtttcctgaggcctcccccgccatgtggaactgtgagtcaattacacctctttcatttataaaaaaangaaaaaacataaangn

SEQ ID NO: 1732 - DNA, 1876 bp, Homo sapiens
  misc_feature (1800)..(1800): n equals a,t,g, or c
  misc_feature (1813)..(1813): n equals a,t,g, or c
  misc_feature (1818)..(1818): n equals a,t,g, or c
  misc_feature (1869)..(1869): n equals a,t,g, or c
tcgacccacgcgtccgctgaggaacagacgttccctggcggccctggcgccttcaaacccagacatgctgctgctgctgctgctgctgcccctgctctgggggacaaaggggatggagggagacagacaatatggggatggttacttgctgcaagtgcaggagctggtgacggtgcaggagggcctgtgtgtccatgtgccctgctccttctcctacccccaggatggctggactgactctgacccagttcatggctactggttccgggcaggagacagaccataccaagacgctccagtggccacaaacaacccagacagagaagtgcaggcagagacccagggccgattccaactccttggggacatttggagcaacgactgctccctgagcatcagagacgccaggaagagggataaggggtcatatttctttcggctagagagaggaagcatgaaatggagttacaaatcacagttgaattacaaaactaagcagctgtctgtgtttgtgacagccctgacccataggcctgacatcctcatcctagggaccctagagtctggccactccaggaacctgacctgctctgtgccctgggcctgtaagcaggggacaccccccatgatctcctggattggggcctccgtgtcctcaccgggccccactactgcccgctcctcagtgctacccttaccccaaagccccaggaccacggcaccagcctcacctgtcaggtgaccttgcctgggacaggtgtgaccacgaccagtaccgtccgcctcgatgtgtcctaccctccttggaacttgaccatgactgtcttccaaggagatgccacagcatccacagccctgggaaatggctcatctctttcagtccttgagggccagtctctgcgcctggtctgtgctgtcaacagcaatccccctgccaggctgagctggacccggsggagcctgaccctgtgcccctcacggtcctcaaaccctgggctgctggagctgcctcgagtgcacgtgagggatgaaggggaattcacctgccgagctcagaacgctcagggctcccagcacatttccctgagcctctccctgcagaatgagggcacaggcacctcaagacctgtatcacaagtgacactggcagcagtcggrggagctggagccacagccctggccttcctgtccttctgcatcatcttcatcatagtgaggtcctgcaggaagaaatcggcaaggccagcagcgggcgtgggggatacaggcatggaagatgcaaaggccatcaggggctcggcctctcaggtgagtgatgtgggcttctccacaccgagcatccagcctggacacctctgacaggatggcccccaggatcgctctctttggtatggccaaagtcacttcctcgtctcctcctccttcccacaggccggcttctacaggactcccccatcttgctgacagcatggcagtccctacccccaatttttcccaggccaggcactgagtaggagttatctcctctctgtcctccttttcttctctatagccccgattcaccatctctcctccatttttcctccccaagaatagctggcatctcttctccctggccccagccatcctgacccctctcattatttttcctattggcgggacctgatttctttgaccggcttgtcatccttacgccactaacctgtgagcttccccaggtcaggtatcatgkctcaattaaggccctgtaattctctctcatttactctcgktttgcccgktgtatcataatttacatgnagatactcatttncttanttttaattttttctcgaggcaagaatcttgctctgtcaacctaaggctggnagtgcaa

SEQ ID NO: 1733 - DNA, 1141 bp, Homo sapiens
  misc_feature (1140)..(1141): n equals a,t,g, or c
acgagattccgtctcaaaaaagaaaaaaaaaaaaaagatggataagttactgctcatccggggaaggccagtattatgggaaacaggatggcatccggagggtgacaacattatagggggagatttcaggttgtttttttccaaagctgagggtactggcaagccaagggggagagggtctaagtgtgagaaccaaggggactgtgcctggaattccttcctgagcctgtgccgtaatgcccgcccctctccctcctccgtctgcgtgcagtcatctggggacctggagaatgatgagcaggcagccagtgccatctctgagctggtcagcacagcctgcggtttccggctgcaccgcggcatgaatgtgcccttcaagcgcctgtctggtgagcccctgcccctgcccttggtggtggtactgggagcggggggctacttccaggggcttctcggcttctcttcttccagcctcctaccatctcctggggtctctggtctggccactttcctmmmtttgggactcccttgtatcagaattgtgaatgagaaggcaagagaaaggagatctagcagaggccactcatcttcaaatctctgagcctggaactatagaacttctttggctttgatcccagccaatgtgcgtgtggccccgccccatggagtctgttgcacccactaactctgtgctcccttccctctcctggggcgggggaaggtgtgtctctcctccagtggtctttggagaacacacactgctggtgacggtgtcaggacagagggtgtttgtggtgaagaggcagaaccgaggtcgggagcccattgatgtctgagcctgccggagggcgagggtcggagaagcggattgggtcctgggcctctgtgatgaggcaggcacacctgtcggtcttggcttgctgctagaactagggccttctgctcgcccacctcccacccctacctggacgggcccaggcttggggactctgagctgtgttaaggagaacaagggcaaggagacctccctttgtgctccctcactccctaataaacatgagtctgatgttctccagaaaaaaaaaaaaaaaaaaaaaaaaaaaaaaaaaaaaaaaaaaaaaaaaaaaaaaaaaaaaaaann

SEQ ID NO: 1734 - DNA, 1285 bp, Homo sapiens
  misc_feature (27)..(27): n equals a,t,g, or c
  misc_feature (42)..(42): n equals a,t,g, or c
  misc_feature (61)..(61): n equals a,t,g, or c
  misc_feature (76)..(76): n equals a,t,g, or c
  misc_feature (109)..(109): n equals a,t,g, or c
tgattaatgggaatcaagcaaacccanaacgggattttgatnttgcgccattttggttaancgtcaattttcaccntgccgaaaagaaggcgagaatatgttccgccanagggccagtcattgcgcgaacatattgcggactttgsmcggtattaacgcgttctaccgaaacmccgaaaaatggattctctgttaccgctgccggaaccttatgtcgtgccgggcggacgctttcgcgaggtatattactgggacagttacttcaccatgttaggacttgccgaaagcggtcactgggataaagtcgcggatatggtggccaattttgctcatgaaatagacacttacggtcatattcccaacggcaaccgcagttactatttaagccgctcgcaaccgyccttctttgccctgatggtagagttactggcgcagcatgaaggcgatgccgcgttgaagcaatacctgccgcaaatgcaaaaagaatatgcttactggatggacggtgttgaaaacctgcaagccggacaacaggaaaaacgcgttgtcaaacttcaggatggtacccttctcaaccgctactgggacgatcgcgatacgccacgaccagagtcatgggtggaagatattgccaccgccaaaagcaatccgaatcgacctgccactgaaatttaccgcgacctgcgctctgccgctgcgtctggctgggatttcagctcgcgctggatggacaacccgcagcagttaaataccttacgcaccaccagcatcgtaccggtcgatctgaacagcctgatgtttaaaatggaaaaaatcctcgcccgcgccagcaaagctgccggagataacgcgatggcaaaccagtacgaaacgctggcaaatgcccgtcaaaaagggatcgaaaaatacctgtggaacgatcaacaaggctggtatgccgattacgacctgaaaagtcataaagtgcgcaatcagttaaccgcggccgccctgttccgctgtacgtcaatgcggcagcgaaagatcgcgccaacaaaatggcgacggcgacgaaacacatctgctgaacccggcggctgaacaccacgtcggtgaaaagtgggcaacaatgggatgcgccaaatggctgggcaccgttacagtgggtcgcgacagaaggattacaaaactacgggcaaaaagaggtggcgatggacattagctggcacttcctgaccaatgttcagcacacctatgaccgggagaaaaagctggtggaaaaatatgatgtcagcaccaccggaac

SEQ ID NO: 1735 - DNA, 3720 bp, Homo sapiens
  misc_feature (9)..(9): n equals a,t,g, or c
  misc_feature (32)..(32): n equals a,t,g, or c
  misc_feature (53)..(53): n equals a,t,g, or c
gggtttttncccccagtcacgacgttgtaaancgacggcccagtgaattgtantacgactcactatagggcgaattgggtaccgggccccccctcgtgccggttgtgcttctttgctgagggacattttgagaaatgaagattcaggttcagaaacagcatatttagaaaacagatctaattctagacctttagaaagcaaaagatacggatcaaaaaagaaaagacatgaaaaacatactattcctttggtagtccagaaagaaacatcatcttcagataataagaaacagatacctaatgaagcttctgctagaagtgaaagagacacatcagacctagagcaaaactggtcattgcaagatcattatagaatgtattcacccataatataccaagccctctgtgagcacgtgcagactcagatgtcactgatgaatgacttgacttcaaagaacatccctaatggaattcctgctgtaccatgccatgctccctctcattctgaatctcaggcaactcctcattctagttatggcttatgtacctccaccccagtctggtcacttcagcggccaccctgccctccaaaggttcattctgaagttcaaactgatggcaacagtcagtttgcatcacaaggtaaaacagtttctgcaacctgtactgatgttctacggaattcatttaataccagtcctggagttccatgtagcctgcccaaaactgacatatcagctattccaacattgcagcaactgggccttgttaatggaattctgccacaacaaggaattcataaggaaacagacctactaaaatgtattcaaacatatttgtctctttttcgatctcatggaaaagaamcgcatctggacagtcagacacaccgaagccctactcagtcacaaccagctttcttggccactaatgaagaaaaatgtgccagagagcaaattagagaggccacaagtgaaagaaaggatttaaacatacatgtgcgagatacaaaaacagtgaaggatgtacagaaggcaaaaaatgtgaacaagacagctgaaaaagttagaattataaaatatttgttgggagagctcaaggccctggtagcagaacaagaggattcagaaattcagaggttgattacagaaatggaggcatgtatatctgtacttccaacagtaagtggaaacacagatattcaagttgagatagcactggccatgcaaccattaagaagtgagaatgctcagttacgaaggcagttgagaattttgaaccagcaactcagagaacaacagaaaactcaaaaaccatctggtgctgtggattgcaaccttgaattgttttctcttcagtcattgaatatgtcactgcaaaatcaattggaggagtcactaaagagccaggaattactgcagagtaaaaatgaagagctgttaaaagtgattgaaaatcagaaagatgaaaacaaaaaatttagtagtatatttaaagacaaagatcaaactatacttgaaaataaacagcaatatgatattgagataacaagaataaaaattgaattggaggaagccctagtcaatgtgaaaagctcccagtttaagttagaaactgctgaaaaggaaaaccagatattggggataacattacgtcagcgtgatgctgaggtgactcgactaagagaattaaccagaactttacagactagcatggcaaagcttctctccgatcttagtgtggacagtgctcgctgcaagcctgggaataaccttaccaaatcactcttgaacattcatgataaacaacttcaacatgacccagctcctgctcacacttccataatgagctatctaaataagttagaaacaaattacagttttacacattcagagccactttctacaattaaaaatgaggaaaccatagagccagacaaaacctatgaaaatgttctgtcctccagaggccctcaaaatagtaacactaggggcatggaggaagcatctgcacctggaattatttctgccctttcaaaacaggattctgatgaagggagtgaaactatggctttaatagaagatgagcataatttggataatacaatttacattccttttgctagaagcactcctgaaaagaaatcaccactttctaagagactatcccctcagccacaaataagagcagctacaacacagctagtcagcaacagtggacttgctgtctctggaaaagaaaataaactgtgtacacctgtaatctgttcctcttcaacaaaggaagcagaagatgcacctgaaaaactttccagagcatctgatatgaaggacacacagctcctcaagaaaataaaggaagcaattggtaagatccctgctgccaccaaggagccagaggaacaaactgcatgtcatggcccatcaggttgtcttagcaacagccttcaagtgaaaggcaatactgtctgtgatggtagtgttttcacttctgacttgatgtctgactggagcatctcttcgttttcaacgttcacttctcgtgatgaacaagacttcagaaatggccttgcggcattagatgccaacatagctagactccagaagtctttaaggactggtcttctggagaaatgaattcagaagaaaaytcatcaggtgcttctttttaaaactagaacttggctatattgaatgtgtatttttctttagtgaaatgatgttttatgttattatgtgtgaagtaatatattgtacaagtaataaatgtattgttgagatatattgacactgaggagcttataaaaacaagtcatcttaagttcacaattgctacaagaagaaagttgtggataactaggaaattattgtaagtaatgttttatttcagtacttagcaattagagttcttttattaagatgtatctgctggattaagggtacaggttgaaatagttctgtggctgtcctaagaaataatgggaaaagaatctctggatgtaagtttttctgttgaaactagagggttttttttttctgtttmcatatacttttttttaatagcaatgtgtttttattaaacatgctgtgtgccacaggccagtgttgttggtgaaatatataaacatttatttaaagagaaaagttaccagtatctacacctcttaaaaaacattgattggtctaaaaaatatatagataacatcctaagttaacatatggcttcttaaaacttgggcacttttatttgtttttatcccaaattcatgttttaaggcctttaaagaatagtcagactgataaagaagtgctaacagataagctatagttggggaaatttgtgggttttttttaaataagaaatgtttatttttgtccttatatttaaacatgatggaatttgtaaatcttggcattgattgtaattctgcctttttggaagaattttttctcccagcatgttagctgagaatattctctattttataaataatatgaagtaggttggtctctctgcttctctataccaggacttcttagctcagtatcatctcccttcatgtaagcagcacgttttaactcttaggaagctgaatgttgtgttatcactaatactttgtacaggtcacctgcctactctaattgtccttagtacttggacaggctttatcattaaagagtgttctcctaatcccaaaaaaaaaaaaaaaaaaaactcgaga

SEQ ID NO: 1736 - DNA, 1896 bp, Homo sapiens
  misc_feature (23)..(23): n equals a,t,g, or c
  misc_feature (41)..(41): n equals a,t,g, or c
  misc_feature (1892)..(1892): n equals a,t,g, or c
  misc_feature (1896)..(1896): n equals a,t,g, or c
gcacacgggggasgggggggaanggggaatcttctttsaanttgggctcccgggcccacaacgcttttgggggtgagggtgtctacgccattgccaggtgctgtctgctaccccaggccaactgcagcgtccacacagctccaccagctgaggccagcatggggacccgtgtccactgccaccaacagggccacgtcctcacaggctgcagctcccactgggaggtggaggayyttggyacccacaagccgcctgtgctgaggccacgaggtcagcccaaccagtgcgtgggccacagggaggccagcatccacgcttcctgctgccatgccccaggtctggaatgcaaagtcaaggagcatggaatcccggcccctcaggagcaggtgaccgtggcctgcgaggagggctggaccctgactggctgcagtgccctccctgggacctcccacgtcctgggggcctacgccgtagacaacacgtgtgtagtcaggagccgggacgtcagcactacaggcagcaccagcgaagaggccgtgacagccgttgccatctgctgccggagccggcacctggcgcaggcctcccaggagctccagtgacagccccatcccaggatgggtgtctggggagggtcaagggctggggctgagctttaaaatggttccgacttgtccctctctcagccctccatggcctggcacgaggggatggggatgcttccgcctttccggggctgctggcctggcccttgagtggggcagcctccttgcctggaactcactcactctgggtgcctcctccccaggtggaggtgccaggaagctccctccctcactgtggggcatttcaccattcaaacaggtcgagctgtgctcgggtgctgccagctgctcccaatgtgccgatgtccgtgggcagaatgacttttattgagctcttgttccgtgccaggcattcaatcctcaggtctccaccaaggaggcaggattcttcccatggataggggagggggcggtaggggctgcagggacaaacatcgttggggggtgagtgtgaaaggtgctgatggccctcatctccagctaactgtggagaagcccctgggggctccctgattaatggaggcttagctttctggatggcatctagccagaggctggagacaggtgtgcccctggtggtcacaggctgtgccttggtttcctgagccacctttactctgctctatgccaggctgtgctagcaacacccaaaggtggcctgcggggagccatcacctaggactgactcggcagtgtgcagtggtgcatgcactgtctcagccaacccgctccactacccggcagggtacacattcgcacccctacttcacagaggaagaaacctggaaccagagggggcgtgcctgccaagctcacacagcaggaactgagccagaaacgcagattgggctggctctgaagccaagcctcttcttacttcacccggctgggctcctcatttttacgggtaacagtgaggctgggaaggggaacacagaccaggaagctcggtgagtgatggcagaacgatgcctgcaggcatggaactttttccgttatcacccaggcctgattcactggcctggcggagatgcttctaaggcatggtcgggggagagggccaacaactgtccctccttgagcaccagccccacccaagcaagcagacatttatcttttgggtctgtcctctctgttgcctttttacagccaacttttctagacctgttttgcttttgtaacttgaagatatttattctgggttttgtagcatttttattaatatggtgactttttaaaataaaaacaaacaaacgttgtcctaaaaaaaaaaaaaaaaaaaaaaancccn

SEQ ID NO: 1737 - DNA, 1863 bp, Homo sapiens
ccacgcgtccgcttctgcttgctcagatatttatggtgagagtatttcatctcattttacagagtcaacaggaaagttgatagagagcttgtcagattgtgcttcctccttacctataaaaaagattgctggtagtaattataacacttttttggactctgaactcagtatgttaaatgggacaaaagttctttcagacagtgccgtgggcattgacctgggtagtactggtgatacaacagaagcattgcacgaactaagaactgccgaagagttcaaaacagaagagcaagatgcctcagggagtatagaatttggtgtatcttttcctgatagggaatcatcatctatggaaacatccatcgaaccaaaagcaactgaaacttctcacacagagggaattactgccattgaggagagctgggagtctatgtttaacgatgatggtgactgcctggatccacgtcttctacaagagttatcagggaataccaagagcagagagagcatccaggaacctagatctgattactacaatcatgaagttcctgatattgacctcagtgattgtgaattcccacatgtcattgaaatttatgactttccccaagaatttcgtactgaagaccttctacgggttttctgcagttatcaaaagaaaggatttgatattaaatgggtggatgatacacatgccctaggagtattctccagtccaattacagctcgtgatgcgttgggtattaaacacaccatggtgaagattcgtcccttgtcacaggccacaagagcagccaaggccaaagctagagcttatgctgagttcctccagccagcaaaggagcgtcctgagacttcagcagccctagccagaaggttagtcatcagtgcccttggggttcgaagtaagcagagcaaaaccgaacgagaagcagagctcaagaaactgcaagaagccagagagagaaagcggttggaagccaagcaacgggaagacatctgggaaggcagagaccagtctacagtttgaacatcactcaatgaaagggataattccatgaatcagaaaatgtttccatagccttcagataagatgatccttccagagctctatgtacatgcagatgtgcatgttaaagagataaagtgatcgagacaaggactgactgggtatagaaggaagacagactcctgtcttcactcctaaatgcagttctttggaatcaccctactgtggtgggcgtagtagggagccatcagctaggaagaaacgtgggagatgtgaattccaagagttgcctggacagggcaagtcatgttagcgtgggtcacacttccaagatatttaaagcaaatacaaaacagaacagaggattcaaaccgcaagtatgggagatttaggccctgcagaggcagaccattccttagtatctcacaaagcagagtaatactggaggcagagtagggggtggttagagagcagttagtacaaagaggcagaacagtgtctggtttacttggcatacacagaatctgcactgccggttccagaactccaaagttggtgaactacaggagatgtgggtatttagactccaaagtttatactgagctcagtgcctgggaccgctccagctgcactgcagccaggggggataccagcttcattcctcagagtaaaccaaccttgggagctgtgtgccagttccagtgtaagcagtaataccatgttgtaagagggaacattaaagcccattttatgacataaaaaaaaaaaaaaaaaaaaaaaaaaaaaaaaaaaaaaaaaaaaaaaaaaaaaaaaaaaaaaaaaaaaaaaaaaaaaaaaaaaaaaaaaaaaaaagg

SEQ ID NO: 1738 - DNA, 1867 bp, Homo sapiens
tcgacccacgcgtccgcttctgcttgctcagatatttatggtgagagtatttcatctcattttacagagtcaacaggaaagttgatagagagcttgtcagattgtgcttcctccttacctataaaaaagattgctggtagtaattataacacttttttggactctgaactcagtatgttaaatgggacaaaagttctttcagacagtgccgtgggcattgacctgggtagtactggtgatacaacagaagcattgcacgaactaagaactgccgaagagttcaaaacagaagagcaagatgcctcagggagtatagaatttggtgtatcttttcctgataggggaatcatcatctatggaaacatccatcgaaccaaaagcaactgaaacttctcacacagagggaattactgccattgaggagagctgggagtctatgtttaacgatgatggtgactgcctggatccacgtcttctacaagagttatcagggaataccaagagcagagagagcatccaggaacctagatctgattactacaatcatgaagttcctgatattgacctcagtgattgtgaattcccacatgtcattgaaatttatgactttccccaagaatttcgtactgaagaccttctacgggttttctgcagttatcaaaagaaaggatttgatattaaatgggtggatgatacacatgccctaggagtattctccagtccaattacagctcgtgatgcgttgggtattaaacacaccatggtgaagattcgtcccttgtcacaggccacaagagcagccaaggccaaagctagagcttatgctgagttcctccagccagcaaaggagcgtcctgagacttcagcagccctagccagaaggttagtcatcagtgcccttggggttcgaagtaagcagagcaaaaccgaacgagaagcagagctcaagaaactgcaagaagccagagagagaaagcggttggaagccaagcaacgggaagacatctgggaaggcagagaccagtctacagtttgaacatcactcaatgaaagggataattccatgaatcagaaaaggtttccatagccttcagataagatgatccttccagagctctatgtacatgcagatgtgcatgttaaagagataaagtgatcgagacaaggactgactgggtatagaaggaagacagactcctgtcttcactcctaaatgcagttctttggaatcaccctactgtggtgggcgtagtagggagccatcagctaggaagaaacgtgggagatgtgaattccaagagttgcctggacagggcaagtcatgttagcgtgggtcacacttccaagatatttaaagcaaatacaaaacagaacagaggattcaaaccgcaagtatgggagatttaggcccttgcagaggcagaccattccttagtatctcacaaagcagagtaatactggaggcagagtagggggtggttagagagcagttagtacaaagaggcagaacagtgtctggtttacttggcatacacagaatctgcactgccggttccagaactccaaagttggtgaactacaggagatgtgggtatttagactccaaagtttatactgagctcagtgcctgggaccgctccagctgcactgcagccaggggggataccagcttcattcctcagagtaaaccaaccttgggagctgtgtgccagttccagtgtaagcagtaataccatgttgtaagagggaacattaaagcccattttatgacataaaaaaaaaaaaaaaaaaaaaaaaaaaaaaaaaaaaaaaaaaaaaaaaaaaaaaaaaaaaaaaaaaaaaaaaaaaaaaaaaaaaaaaaaaaaaa

SEQ ID NO: 1739 - DNA, 980 bp, Homo sapiens
ggccatgaggtcgttcgtgtctgttgaacggctgtgggcgtcttgctgccttgggtagggggttaaaatcgttcttgagaggaacgtctctgtgcgaagagataatgagtttagctctgagaagtgagcttgtagtggacaaaacaaagaggaaaaaaagaagagaactgtctgaggaacagaaacaagaaattaaagatgcttttgaactatttgatacagacaaagatgaagcaatagattatcatgaattaaaggtggcaatgagagccttggggtttgatgtaaaaaaagctgatgtactgaagattcttaaagattatgacagagaagccacagggaaaatcacctttgaagattttaatgaagttgtgacagactggatattggaaagagatccccatgaagaaatactcaaggcatttaaactatttgatgatgatgattcaggtaaaataagcttgaggaatttgcgacgtgttgctagagaattgggtgaaaacatgagtgatgaagaacttcgagctatgatagaagaatttgacaaagatggtgatggagaaataaaccaagaggagttcattgctattatgactggtgacatttaaagaattacaaggataaacactaagaatgttgcagttaccatcttatattctatttttgtgcctggagccatgtgaaaaaaaccaacttagttcttttatcctaaaggaccaaaaataagcatcttatatatctgtattttactactgttaagtttctttgtatgaactgtgttgttagtactcagatagtttagctttgtatttataatagagcttttatataaagttttaaaaattgaatgtgtgatatgtgttctttgaaggttttttaatttaacatttatagtcactttttagtgcacacattttccagactttcgttaataaaatatttattttattagaattttaaaaaaaaaaaaaaaaaaaaaa

SEQ ID NO: 1740 - DNA, 1798 bp, Homo sapiens
tcgacccacgcgtccgcttctgcttgctcagatatttatggtgagagtatttcatctcattttacagagtcaacaggaaagttgatagagagcttgtcagattgtgcttcctccttacctataaaaaagattgctggtagtaattataacacttttttggactctgaactcagtatgttaaatgggacaaaagttctttcagacagtgccgtgggcattgacctgggtagtactggtgatacaacagaagcattgcacgaactaagaactgccgaagagttcaaaacagaagagcaagatgcctcagggagtatagaatttggtgtatcttttcctgatagggaatcatcatctatggaaacatccatcgaaccaaaagcaactgaaacttctcacacagagggaattactgccattgaggagagctgggagtctatgtttaacgatgatggtgactgcctggatccacgtcttctacaagagttatcagggaataccaagagcagagagagcatccaggaacctagatctgattactacaatcatgaagttcctgatattgacctcagtgattgtgaattcccacatgtcattgaaatttatgactttccccaagaatttcgtactgaagaccttctacgggttttctgcagttatcaaaagaaaggatttgatattaaatgggtggatgatacacatgccctaggagtattctccagtccaattacagctcgtgatgcgttgggtattaaacacaccatggtgaagattcgtcccttgtcacaggccacaagagcagccaaggccaaagctagagcttatgctgagttcctccagccagcaaaggagcgtcctgagacttcagcagccctagccagaaggttagtcatcagtgcccttggggttcgaagtaagcagagcaaaaccgaacgagaagcagagctcaagaaactgcaagaagccagagagagaaagcggttggaagccaagcaacgggaagacatctgggaaggcagagaccagtctacagtttgaacatcactcaatgaaagggataattccatgaatcagaaaatgtttccatagccttcagataagatgatccttccagagctctatgtacatgcagatgtgcatgttaaagagataaagtgatcgagacaaggactgactgggtatagaaggaagacagactcctgtcttcactcctaaatgcagttctttggaatcaccctactgtggtgggcgtagtagggagccatcagctaggaagaaacgtgggagatgtgaattccaagagttgcctggacagggcaagtcatgttagcgtgggtcacacttccaagatatttaaagcaaatacaaaacagaacagaggattcaaaccgcaagtatgggagatttaggccctgcagaggcagaccattccttagtatctcacaaagcagagtaatactggaggcagagtagggggtggttrgagagcagttagtacaaagaggcagaacagtgtctggtttacttggcatacacagaatctgcactgccggttccagaactccaaagttggtgaactacaggagatgtgggtatttagactccaaagtttatactgagctcagtgcctgggaccgctccagctgcactgcagccaggggggataccagcttcattcctcagagtaaaccaaccttgggagctgtgtgccagttccagtgtaagcagtaataccatgttgtaagagggaacattaaagcccattttatgacataaaaaaaaaaaaaaaaaamaaaaaaaa

SEQ ID NO: 1741 - DNA, 1789 bp, Homo sapiens
cggcacgagcgacaggtcagagctgcggcctgagcagccagcgtccggcatgaaggtctggggtctggctgctgcctgcttcttgctccagcaccatggaatgcctgcgcagtttaccctgcctcctgccccgcgcgatgagacttccccggcggacgctgtgtgccctggccttggacgtgacctctgtgggtcctcccgttgctgcctgcggccgccgagccaacctgattggaaggagccgagcggcgcagctttgcgggcccgaccggctccgcgtggcaggtgaagtgcaccggtttagaacctctgacgtctctcaagccactttagccagtgtagccccagtatttactgtgacaaaatttgacaaacagggaaacgttacttcttttgaaaggaagaaaactgaattataccaagagttaggtcttcaagccagagatttgagatttcagcatgtaatgagtatcacagtcagaaacaataggattatcatgagaatggagtatttgaaagctgtgataactccagagtgtcttctgatattagattatcgtaatttaaacttagagcaatggctgttccgggaactcccttcacagttgtctggagagggtcaactcgttacataccctttaccttttgagtttagagctatagaagcactcctgcaatattggatcaacacccttcaggggaaacttagcattttgcagccactgatccttgagaccttggatgctttggtggaccccaaacattcttctgtagacagaagcaaactgcacattttactacagaatggcaaaagtctatcagagttagaaacagatattaaaattttcaaagagtcaattttggagatcttggatgaggaagagttgctagaagagctctgtgtatcaaaatggagtgacccacaagtctttgaaaagagcagtgctgggattgaccatgcagaagaratggagttgctgttggaaaactactaccgattggctgacgatctctccaatgcagctcgtgagcttagggtgctgattgatgattcacaaagtattattttcattaatctggacagccaccgaaacgtgatgatgaggttgaatctacagctgaccatgggaaccttctctctttcgctctttggactaatgggagttgcttttggaatgaatttggaatcttcccttgaagaggaccatagaattttttggctgattacaggaattatgttcatgggaagtggcctcatctggaggcgcctgctttcattccttggacgacagctagaagctccattgcctcctatggtatgaaggatatggttcacggcggtattgtggaagggttatgatcatgggccctaaagtcagagcgcctgggattaagttgtcacaggcactatggcccttgcgagttgctttctcaaacttccttcagtttccctatctgtcagttaagtcggtattacctgcttcatagggttatgggaagaattaaacaatatgtgtaaagcacttactagcacactgcctaacacaataagttagaaatataatttgtgtagaactctgacaacatacatttaaacagatgttagtaattctggtataaggtttgtcataaccaaatggaaatgtaggaaacatttataatgttcttaaaagatagaaaattcacctccattttctttgtacttgaagatggcaccactggaataaatacttaagacactgaaaaaaaaaaaaaaaaaactcgaggtcgacggtatcgataagcttga

SEQ ID NO: 1742 - DNA, 499 bp, Homo sapiens
  misc_feature (490)..(491): n equals a,t,g, or c
gctggaggagaggatcatggagctgcataagacatataggggatgaccccgggagaagcagaaatccacttcttagagaatgccaagaagctttccatgtacggagtagacctgcaccatgccaaggactctgagggcatcgacatcatgttaggcgtttgtgcaatggcctgctcatctaccgggaccggctgagaatcaaccgctttgcctggcccaagatcctcaagatctcctacaagaggagtaacttctatatcaagatccgcagccatccgcagggccagcgccatcctgcgcagccagaagcctgtgatggtgaagaggaagcggacccgccccaccaagagctcctgagccccctgcccccagagcaataaagtcagctggctttctcaaaaaaaaaaaaaaaaaaaaaaaaaaaaaaaaaaaaaaaaaaaaaaaaaaaaaaaaaaaaaaaaaaaaaaaaaaaaaaaaaaaaaaaaaaaanngggggggg

SEQ ID NO: 1743 - DNA, 2068 bp, Homo sapiens
  misc_feature (2061)..(2061): n equals a,t,g, or c
ctcgcgccagcccttcccgctcttctgttctcgctctatttgccccgctgactgctggcctcgccagctttgccagtcttacgtctctgccgcccccactcccgcccgcgccccatcttcttgcgcgactcgcgcccgctggtccccccctcctcctcccgcgtcctgcctgccccctcctcctgctctcgcaggctccttggcacccaggccgggaggcgacgcgcccagccgtctaaacgggaacagccctggctgagggagctgcagcgcagcagagtatctgacggcgccaggttgcgtaggtgcggcacgaggagttttcccggcagcgaggaggtcctgagcagcatggcccggaggagcgccttccctgccgccgcgctctggctctggagcatcctcctgtgcctgctggcactgcgggcggaggccgggccgccgcaggaggagagcctgtacctatggatcgatgctcaccaggcaagagtactcataggatttgaagaagatatcctgattgtttcagaggggaaaatggcaccttttacacatgatttcagaaaagcgcaacagagaatgccagctattcctgtcaatatccattccatgaattttacctggcaagctgcagggcaggcagaatacttctatgaattcctgtccttgcgctccctggataaaggcatcatggcagatccaaccgtcaatgtccctctgctgggaacagtgcctcacaaggcatcagttgttcaagttggtttcccatgtcttggaaaacaggatggggtggcagcatttgaagtggatgtgattgttatgaattctgaaggcaacaccattctccaaacacctcaaaatgctatcttctttaaaacatgtcaacaagctgagtgcccaggcgggtgccgaaatggaggcttttgtaatgaaagacgcatctgcgagtgtcctgatgggttccacggacctcactgtgagaaagccctttgtaccccacgatgtatgaatggtggactttgtgtgactcctggtttctgcatctgcccacctggattctatggagtgaactgtgacaaagcaaactgctcaaccacctgctttaatggagggacctgtttctaccctggaaaatgtatttgccctccaggactagagggagagcagtgtgaaatcagcaaatgcccacaaccctgtcgaaatggaggtaaatgcattggtaaaagcaaatgtaagtgttccaaaggttaccagggagacctctgttcaaagcctgtctgcgagcctggctgtggtgcacatggaacctgccatgaacccaacaaatgccaatgtcaagaaggttggcatggaagacactgcaataaaaggtacgaagccagcctcatacatgccctgaggccagcaggcgcccagctcaggcagyacacgccttcacttaaaaaggccgaggagcggcgggatccacctgaatccaattacatctggtgaactccgacatctgaaacgttttaagttacaccaagttcatagcctttgttaacctttcatgtgttgaatgttcaaataatgttcattacacttaagaatactggcctgaattttattagcttcattataaatcactgagctgatatttactcttccttttaagttttctaagtacgtctgtagcatgatggtatagattttcttgtttcagtgctttgggacagattttatattatgtcaattgatcaggttaaaattttcagtgtgtagttggcagatattttcaaaattacaatgcatttatggtgtctgggggcaggggaacatcagaaaggttaaattgggcaaaaatgcgtaagtcacaagaatttggatggtgcagttaatgttgaagttacagcatttcagattttattgtcagatatttagatgtttgttacatttttaaaaattgctcttaatttttaaactctcaatacaatatattttgaccttaccattattccagagattcagtattaaaaaaaaaaaaaaaamactcgagggggggcccgtacccaatcgcctgtnatgagtg

SEQ ID NO: 1744 - DNA, 2027 bp, Homo sapiens; identical to SEQ ID NO: 1000

SEQ ID NO: 1745 - DNA, 904 bp, Homo sapiens
  misc_feature (658)..(658): n equals a,t,g, or c
  misc_feature (884)..(884): n equals a,t,g, or c
agtttttttttttttttttttcaacattgtaacaggtttatgcattttgaagtgccttctacacatccacccagaggctctgctgatttcacttatgcccaggctataaaatgcctttctctcatcccccagtagagcactgggatcaccactaggcctagggggcatatcaagggtttaatagactgggggaatgggcaacagaactggctaccttagaggctctggaatgccccccacccatccacccaccaatggaaggaaagtcaggcatcgcctaaaaggaatggtccctatctagccccaagtctggagcagaaagggcaggtccattctggcccaagtgacattgttagatcctgtcccctcccccaatcactgctgcttgccarggtgcctcttcacagttcccatgtggcagcagtagtggcagaggcagaagtggacttattgtagattgcagtacagatacatggacacaatcatggcagccagctggagagggaggaacagggagagatgagggaacatgataggatcctgaagcctgtcccacagacaccctacctgargcccagttagaagtctgtttcctccagagaggcctcagatgggttgagcagccctggtctcatgcccatgtcccagtcccagctcntgatctgcttacctcgaggcccccaattccagctgccacaccacccacggtgactgcattagttcggatgtcatacaaaagctgattgaagcaacccttcaggaagagaaaagagcatttatagttggcagctgccctactcccatccccgtttgccactctgaggccatgaaaacagtccccacccactcatgccagcccacacctatatttttggtggtgagcntttggcttgttttcaaaatg

SEQ ID NO: 1746 - DNA, 365 bp, Homo sapiens
  misc_feature (287)..(287): n equals a,t,g, or c
  misc_feature (347)..(347): n equals a,t,g, or c
  misc_feature (362)..(362): n equals a,t,g, or c
ctcaggcttctgtctcacttttccgggggggggattagggcaaggagggcatgagggactgtctctccctaaaacccagacccctgttccccactcagttcttcttcatcctcctcctcatcttcattgctgaggttgcagctgctgtggtcgccttggtgtacaccacaatggtgagacactgggatggaggaagggaagaagattgggcaaaaccctgggagtgggctgtggccttgtgaaatggccacctttctgtaccagcccctaaaacactggcctgcctnacccagggttgagcactttcctggacgtttgctggtagtgcctgccatcaagaaagttantgggtttcccagggnaga

SEQ ID NO: 1747 - DNA, 570 bp, Homo sapiens
  misc_feature (53)..(53): n equals a,t,g, or c
  misc_feature (57)..(57): n equals a,t,g, or c
  misc_feature (63)..(63): n equals a,t,g, or c
  misc_feature (65)..(65): n equals a,t,g, or c
ctgattgaaccaacccctcgggaagagaaaagagcatttatagttggcagctncccnactccnanccccgtttgccactctgaggccattgaaaacaagtccccaaccmaytcatgccaagcccaacaaccctytactttttggktcgttgagccttttgctttggtgcagggtttcattgggctgtgttgggtgacgttgtcattgcaacagaatgggggaaaggcactgttctctttgaagtagggtgagtcctcaaaatccgtatagttggtgaagccacagcacttgagctggagacaagatgagggtggaggtggggccttgcttctttctctccaccctaaaacctcccccagccaaccttacccctttcatggtggtgttccacacttgagtgaagtcttcctgggaaccataatctttcttgatggcaggcactaccagcaacgtcaggaagtgctcagcctgggtgaggcaggccagtgtttaggggctggtacagaaggtggccattcacaggccacagcccactcccagrgttttgcccttattcgtccttcctccaaa

SEQ ID NO: 1748 - DNA, 2055 bp, Homo sapiens
  misc_feature (1206)..(1206): n equals a,t,g, or c
tcgagttttttttttttttttttactctttaaaacaatctttattgtgactcagtagcgttttgagtgtcggttcagctaacctgactaggttgcattctttagggcttcatcctagcagtccccaaggctgctctagtgctttcagttctttgatcctccaataaactccctgaaaggacaggttgaataagtcctctgtgctaacattaaggtatgtcagatgaacatttttctccatacaaatgctggatcctttggatatcatcggcactgagctggaaggttctagggtcgtgataccagtaagtggggtacattatggagctctgattcccagagtgctgcaggcccaaagaatgcccaatctcatgagttgcaaccaggaacagattatatccagtgtctgaagctgaccagtgttcattcttgtcaaaatggacaactccaggatttccagaatttggtaaaaaggcatggcctaagataccacctggcccatcaaagggccaaccatcttcatgggcccactgccagaaagaaaccttgatgtctgcatctccattctgcacttgctggaatatcaaaggggtcacattgytccagatggaaactgcattatatatactgtctttcactgcggatggcttcatatcatgtgggtaattgataatcctgaggaagcaatctctaaatgaaatagttcagaggaatgggaattatcttagctctaaacatgaataattctactttggggagatcatttaatagttttaggactcattttggttatttataaagttgagctaatttcagactaattaaatcagaaacttaaggaattaaacatgcaaatatagatttytaagaattttaacaatatcccaaattattcttaggtcagctaaagtctaagaatgacagtcctatctggtggttggggaaaaataagtaaataaaacaatgtgaacaaaattaaattaaattaaatatgcagcattctacataaattaaaatgtatagcattctacataatttagtactgcttgctttagatatctcaagtatatttagaatccccaacagaaagagtaacctaggcagaaattaagttttcaaaattgtaccttagaaccatccacacactcacgcattaaaattaaaaagaaaagatttaacaaagggaaaggatagtggttatgctctntactttctaaagagatggttagaggaagctagaaaaggatctggtagtattaccttctctgagggagattttgggctttgagcgggctgccaatgaaagcagaagagagtagaggtacctccaggagagacctggtagaaagccctttgaggtcatcaccccacacattatcctctaggccttagtaacaagcacctgtaagttagagtgtgcttattccacttgcatcttcctggcgagatggaggtgtcggacccatcaggcaccccacagtggggctggtgtagcagagcatgcatctgcatgtcaagtaggtctgtcccattccgatggaattgttgcaggagctgtgtttgtgtctcctgggtaaggagtggcgactccttctcggtcaggaaaaattgatggaaatagccctgaatcagatcaagaaggatgagtactaagagtcaatagggaagacccatatatcagttaccctgggcatagccttctttgagggtctcagaaggacggtacttagtctggccttcctaagtctcctgttctcagtcagatgatggcagccatccctgattctttatgccacagtgaaatgatatgaatgagaagtgacagaataaaaataacatggataaacaataacatttttttaaaagaaaaagcttccaagttttaggatggagaaacccaagtataaacgacaggaagatattacctgggaattccccggggaagatggcctctggtctttctgactgatggaggttttcttaatcaggatacaatcaatcactccaggacataaaatttggctggttctgcattccccatttcatttgcagtgcc

SEQ ID NO: 1749 - DNA, 1027 bp, Homo sapiens
ttttgcaggaattcggcacgasaaatgagggtttggcatgcagctcgtcatcttaagagttactatcttcttgccctggtgtttcgccgttccagtgccccctgctgcagaccataaaggatgggactttgttgagggctatttccatcaatttttcctgaccgagaaggagtcgccactccttacccaggagacacaaacacagctcctgcaacaattccatcggaatgggacagacctacttgacatgcagatgcatgctctgctacaccagccccactgtggggtgcctgatgggtccgacacctccatctcgccaggaagatgcaagtggaataagcacactctaacttacaggattatcaattacccacatgatatgaagccatccgcagtgaaagacagtatatataatgcagtttccatctggagcaatgtgacccctttgatattccagcaagtgcagaatggagatgcagacatcaaggtttctttctggcagtgggcccatgaagatggttggccctttgatgggccaggtggtatcttaggccatgcctttttaccaaattctggaaatcctggagttgtccattttgacaagaatgaacactggtcagcttcagacactggatataatctgktcctggktgcaactcatgagattgggcattctttgggcctgcagcactctgggaatcagagctccataatgtaccccacttactggkatcacgaccctagaaccttccagctcagtgccgatgatatccaaaggatccagcatttgtatggagaaaaatgttcatctgacataccttaatgttagcacagaggacttattcaacctgtctttcagggagtttattggaggatcaaagaactgaaagcactagagcagccttggggactgctaggatgaagccctaaagaatgcaacctagtcaggttagctgaaccgacactcaaaacgctactgagtcacaataaagattgttttaaagagtaaaaaaaaaaaaaaaaaaaa

SEQ ID NO: 1750 - DNA, 969 bp, Homo sapiens
gcagctcgtcatcttaagagttactatcttcttgccctggtgtttcgccgttccagtgccccctgctgcagaccataaaggatgggactttgttgagggctatttccatcaatttttcctgaccgagaaggagtcgccactccttacccaggagacacaaacacagctcctgcaacaattccatcggaatgggacagacctacttgacatgcagatgcatgctctgctacaccagccccactgtggggtgcctgatgggtccgacacctccatctcgccaggaagatgcaagtggaataagcacactctaacttacaggattatcaattacccacatgatatgaagccatccgcagtgaaagacagtatatataatgcagtttccatctggagcaatgtgacccctttgatattccagcaagtgcagaatggagatgcagacatcaaggtttctttctggcagtgggcccatgaagatggttggccctttgatgggccaggtggtatcttaggccatgcctttttaccaaattctggaaatcctggagttgtccattttgacaagaatgaacactggtcagcttcagacactggatataatctgttcctggttgcaactcatgagattgggcattctttgggcctgcagcactctgggaatcagagctccataatgtaccccacttactggtatcacgaccctagaaccttccagctcagtgccgatgatatccaaaggatccagcatttgtatggagaaaaatgttcatctgacataccttaatgttagcacagaggacttattcaacctgtcctttcagggagtttattggaggatcaaagaactgaaagcactagagcagccttggggactgctaggatgaagccctaaagaatgcaacctagtcaggttagctgaaccgacactcaaaacgctactgagtcmcaataaagattgttttaaagagt

SEQ ID NO: 1751 - DNA, 1000 bp, Homo sapiens
ggcacgagcatgcagctcgtcatcttaagagttactatcttcttgccctggtgtttcgccgttccagtgccccctgctgcagaccataaaggatgggactttgttgagggctatttccatcaatttttcctgaccgagaaggagtcgccactccttacccaggagacacaaacacagctcctgcaacaattccatcggaatgggacagacctacttgacatgcagatgcatgctctgctacaccagccccactgtggggtgcctgatgggtccgacacctccatctcgccaggaagatgcaagtggaataagcacactctaacttacaggattatcaattacccacatgatatgaagccatccgcagtgaaagacagtatatataatgcagtttccatctggagcaatgtgacccctttgatattccagcaagtgcagaatggagatgcagacatcaaggtttctttctggcagtgggcccatgaagatggttggccctttgatgggccaggtggtatcttaggccatgcctttttaccaaattctggaaatcctggagttgtccattttgacaagaatgaacactggtcagcttcagacactggatataatctgttcctggttgcaactcatgagattgggcattctttgggcctgcagcactctgggaatcagagctccataatgtaccccacttactggtatcacgaccctagaaccttccagctcagtgccgatgatatccaaaggatccagcatttgtatggagaaaaatgttcatctgacataccttaatgttagcacagaggacttattcaacctgtcctttcagggagtttattggaggatcaaagaactgaaagcactagagcagccttggggactgctaggatgaagccctaaagaatgcaacctagtcaggttagctgaaccgacactcaaaacgctactgagtcacaataaagattgttttaaagagtaaaaaaaaaaaaaaaaaaaa

SEQ ID NO: 1752 - DNA, 2029 bp, Homo sapiens
gctacccgcgctccccgcggccwcttcgcttttgtggcggcgcccgcgctcgcaggccactctctgctgtcgcccgtcccgcgcgctcctccgacccgctccgctccgctccgctcggccccgcgccgcccgtcaacatgatccgctgcggcctggcctgcgagcgctgccgctggatcctgcccctgctcctactcagcgccatcgccttcgacatcatcgcgctggccggccgcggctggttgcagtctagcgaccacggccagacgtcctcgctgtggtggaaatgctcccaagagggcggcggcagcgggtcctacgaggagggctgtcagagcctcatggagtacgcgtggggtagagcagcggctgccatgctcttctgtggcttcatcatcctggtgatctgtttcatcctctccttcttcgccctctgtggaccccagatgcttgtcttcctgagagtgattggaggtctccttgccttggctgctgtgttccagatcatctccctggtaatttaccccgtgaagtacacccagaccttcacccttcatgccaaccgtgctgtcacttacatctataactgggcctacggctttgggtgggcagccacgattatcctgatcggctgtgccttcttcttctgctgcctccccaactacgaagatgaccttctgggcaatgccaagcccaggtacttctacacatctgcctaacttgggaatgaatgtgggagaaaatcgctgctgctgagatggactccagaagaagaaactgtttctccaggcgactttgaacccattttttggcagtgttcatattattaaactagtcaaaaatgctaaaataatttgggagaaaatattttttaagtagtgttatagtttcatgtttatcttttattatgttttgtgaagttgtgtcttttcactaattacctatactatgccaatatttccttatatctatccataacatttatactacatttgtaagagaatatgcacgtgaaacttaacactttataaggtaaaaatgaggtttccaagatttaataatctgatcaagttcttgttatttccaaatagaatggactcggtctgttaagggctaaggagaagaggaagataaggttaaaagttgttaatgaccaaacattctaaaagaaatgcaaaaaaaaagtttattttcaagccttcgaactatttaaggaaagcaaaatcatttcctaaatgcatatcatttgtgagaatttctcattaatatcctgaatcattcatttyagctaaggcttcatgttgactcgatatgtcatctaggaaagtactatttcatggtccaaacctgttgccatagttggtaaggctttcctttaagtgtgaaatatttagatgaaattttctcttttaaagttctttatagggttagggtgtgggaaaatgctatattaataaatctgtagtgttttgtgtttatatgttcagaaccagagtagactggattgaaagatggactgggtctaatttatcatgactgatagatctggttaagttgtgtagtaaagcattaggagggtcattcytgtcacaaaagtgccactaaaacagcctcaggagaataaatgacttgcttttctaaatctcaggtttatctgggctctatcatatagacaggcttctgatagtttgcaactgtaagcagaaacctacatatagttaaaatcctggtctttcttggtaaacagattttaaatgtctgatataaaacatgccacaggagaattcggggatttgagtttctctgaatagcatatatatgatgcatcggataggtcattatgattttttaccatttcgacttacataatgaaaaccaattcattttaaatatcagattattattttgtaagttgtggaaaaagctaattgtagttttcattatgaagttttcccaataaaccaggtattctaaaaaaaaaaaaaaaaaaaaactcgaggggggcccggtacccaatcgccgtatatga

SEQ ID NO: 1753 - DNA, 314 bp, Homo sapiens
  misc_feature (9)..(9): n equals a,t,g, or c
  misc_feature (32)..(32): n equals a,t,g, or c
  misc_feature (42)..(42): n equals a,t,g, or c
aaagcttanaaaaagactttctttgaaattcnctctcagaanaattaagtttttacttctaattattttgcattactttgagttaaatttgaatagagtattaaatataaagttgtagattcttatgtgtttttgtattagcccagacatctgtaatgtttttgcactggtgacagacaaaatctgttttaaatcatatccagcacaaaaactatttctggctgaatagcacagwaagtattttwacctacctgtagagatcctcgtcatggaaaggtgccaaactgttttgaatggaaggacaagtaagagtg

SEQ ID NO: 1754 - DNA, 2128 bp, Homo sapiens
ggtcacgggagccggtgtctcaggctccgccccttcaccccccgaaaggctaatccccacttccgaccctctcaggccttttccgcttctcttttacctccccaggtccgcccgtctgcgcccctcacaggaagccggagggtcgctctgatcccgaatctcccacaggcgtgaacctgctctgctgtgtatctttgcggggtggcctgcgctgaggcctgccgcgcgcggtgagtccgcgcagacctgaccctgcgtctcgcagctcggttgaggccgccgccgccttctcgggatgccgcggccggggtccgcgcagcgctgggcggccgtcgcgggccgttgggggtgcaggctgctcgcactgctgctactggtgcctggacccggcggcgcctctgagatcaccttcgagcttcctgacaacgccaagcagtgcttctacgaggacatcgctcagggcaccaagtgcaccctggagttccaggtgattactggtggtcactatgatgtagattgtcgattagaagatcctgatggtaaagtgttatacaaagagatgaagaaacagtatgatagttttaccttcacagcctccaaaaatgggacatacaaattttgcttcagcaatgaattttctactttcacacataaaactgtatattttgattttcaagttggagaagacccacctttgtttcctagtgagaaccgagtcagtgctcttacccaggtaaataaaaaaatcagcaatataatgttggtatatttaaaaggaggaaaaaagcataatttaatatcatgcactaactgatgagcatggaattttgagactgacagtctttaaaatctatcttaattcttacatgtaggcatttcacagagaacttcagacttttgtagtgaaaaataatgttgaaagattttatgaacttttaattgtaaagagaaagaagcattaaaataaggaggaagatcactaaggtagaaacatcagtggtaaaagaaggttgggaaggctgagcagtgttccaatcttctgaagcattttctttaatccctgaaggaatgttgctgtcatactcaggaggctggtgtaactggaagcaaaatgatgcctaaattagtagataaataataccatatcatagcctttataccattacttagtgttactcaagctgctgtaacagtaacttgtgatgtaactttaggtgaaatattgaagattaatggtaagtcatctcacaaaaatagttacaaaagctaaattcagatttattttggagacatagagaaagcgtaaaaaatttaaacccagtgaacaactattgcttaggtgatgaggactgttttatttctagttcaaatacagcaaaatccaaaatgcttcaaaatccaaaacttttttttagctccaacctgatgacacaagtggaagattgttacatctgatctcatgacacatcattgaaaatatcatatacagttgccttaaggctgcatgtataaggcatatatgaaacataaatgaatttcatgtctagacctgggttccatcacaaagatatctcattatgtatatgtagacattccaaaatcagaaaaaatctgaaattcaaagcacttctggtcccaaacattttggataagggatactcaacctgtatgggcttagatcgtatctaaaagttactcaattaggcatgaaaaagaattatttaccacttattcgttaacatcttaaactggtattttagtgttcccagggttctatttagtctcttggccaaagtcatggtgaaagaaacagctttaagaatgtgtaaaagccttaattcataaacctgttgttagaattagcaagatatattcaaatactcttaattttagaaatgttctctttattttaaggtcttgtgtgaaggaccccttgctttgtaaaatgatatttctttggggccattaccttaacctgtatccattccttcatgaattttaacttgtataaggtggcttgttctaaaaacctaagtgggtaaatataagaaatgaatggtaataaagcagttagtatcataaaaaaaaaaaaaaaaaaaaaaaaaaaaaaaaaaaaaaaaaaaaaaaa

SEQ ID NO: 1755 - DNA, 1079 bp, Homo sapiens
  misc_feature (4)..(4): n equals a,t,g, or c
  misc_feature (1039)..(1039): n equals a,t,g, or c
  misc_feature (1060)..(1060): n equals a,t,g, or c
  misc_feature (1079)..(1079): n equals a,t,g, or c
gggntttttttttttttttttttttttttttttttttttttttttttttttttttttttatgtaggtaagctttttattattgttttctttacaggaacaataatccaaacaaatcttgaaccaatctataaacagaaaacctgttatataaattattatctatttttgcaatacatcaaaatactgtattgatgaaaataaatagataacaaaaaacaatatacatcatttctatgtttgctatcagaccccacaagtatgtttgtttttacaattcattataggtgaaaaacaaactgaaacacaacaggtacgtacaattacgccactgttaaggactgcagattacacgtgttaaagcttttcttaataaaatgggaacacattgctaggtacacagaaacatgattttgccctaaagaacagctgaactgttgagagaagcaagggcttcctagcggccttccagtgtagcagataatattaccctgtgtaacagagtattacagagttttgcattttccaagtctgtaagtctaaccataaacaaaacaaagacaaacccaaacattaagatatactgacaatcttgttcccatatatgatagaatagttctcatacactgttaagattgatttacttttttattaggagcacttctcaggtttttggcatttcacatgtctacactcagtgtccattggctccttctgagagtatccttgaaggttcggtaaattttgcagtgaacaagtaaaaaagggctggtgtaggtaccaaagccaaaaggggcaaatcttgctcaagtttatccactctggaaatggagattattccataggcatgaagtaaccagtggctgaagagaacaataagtcttttctttctgaccagaagatcatagcagttctctatttcagaagcagacatgtacacagccagagtaaccaaagataacactaatataatgtatgggaaggcgtaatataaaaggcctccaccaactgcstgaagcacggttrraattgggaagaagnaaagtgcagcatggatagttnctaaagaaaagatgagctn

SEQ ID NO: 1756 - DNA, 1353 bp, Homo sapiens
  misc_feature (1165)..(1165): n equals a,t,g, or c
  misc_feature (1285)..(1285): n equals a,t,g, or c
agctgtggcccggatgttcggtgcagctgccagatccgctgatctagtgcttctcgaaaaaaaccttcaggcggcccatggctgtcgatattcaaccagcatgccttggactttattgtgggaagaccctattatttaaaaatggctcaactgaaatatatggagaatgtggggtatgcccaagaggacagagaacgaatgcacagaaatattgtcagccttgcacagaatctcctgaactttatgattggctctatcttggatttatggcaatgcttcctctggttttacattggttcttcattgaatggtactcggggaaaaagagttccagcgcacttttccaacacatcactgcattatttgaatgcagcatggcagctattatcaccttacttgtgagtgatccagttggtgttctttatattcgttcatgtcgagtattgatgctttctgactggtacacgatgctttacaacccaagtccagattacgttaccacagtacactgtactcatgaagccgtctacccactatataccattgtatttatctattacgcattctgcttggtattaatgatgctgctccgacctcttctggtgaagaagattgcatgtgggttagggaaatctgatcgatttaaaagtatttatgctgcactttacttcttcccaattttaaccgtgcttcaggcagttggtggaggccttttatattacgccttcccatacattatattagtgttatctttggttactctggctgtgtacatgtctgcttctgaaatagagaactgctatgatcttctggtcagaaagaaaagacttattgttctcttcagccactggttacttcatgcctatggaataatctccatttccagagtggataaacttgagcaagatttgccccttttggctttggtacctacaccagcccttttttacttgttcactgcaaaatttaccgaaccttcaaggatactctcagaaggagccaatggacactgagtgtagacatgtgaaatgccaaaaacctgagaagtgctcctaataaaaaagtaaatcaatcttaacagtgtatgagaactattctatcatatatgggaacaagattgtcagtatatcttaatggttgggtttgkctttggtttggttatggntagacttacagacttggaaaatgcaaaactctgkaatactctggtacacarggtaatattatctgctacactggaaggccgctaggaagcccttgcttctcttaacagttyaactggtcnttwaggcaaaatcatgkttctggggaccyaacaatggggtcccattttawttaagaaaagctttaacc

SEQ ID NO: 1757 - DNA, 1101 bp, Homo sapiens
  misc_feature (1092)..(1092): n equals a,t,g, or c
  misc_feature (1099)..(1099): n equals a,t,g, or c
tgcaggaattcggcacgagccagatccgctgatctagtgcttctcgaaaaaaaccttcaggcggcccatggcatgccttggactttattgtgggaagaccctattatttaaaaatggctcaactgaaatatatggagaatgtggggtatgcccaagaggacagagaacgaatgcacagaaatattgtcagccttgcacagaatctcctgaactttatgattggctctatcttggatttatggcaatgcttcctctggttttacattggttcttcattgaatggtactcggggaaaaagagttccagcgcacttttccaacacatcactgcattatttgaatgcagcatggcagctattatcaccttacttgtgagtgatccagttggtgttctttatattcgttcatgtcgagtattgatgctttctgactggtacacgatgctttacaacccaagtccagattacgttaccacagtacactgtactcatgaagccgtctacccactatataccattgtatttatctattacgcattctgcttggtattaatgatgctgctccgacctcttctggtgaagaagattgcatgtgggttagggaaatctgatcgatttaaaagtatttatgctgcactttacttcttcccaattttaaccgtgcttcaggcagttggtggaggccttttatattacgccttcccatacattatattagtgttatctttggttactctggctgtgtacatgtctgcttctgaaatagagaactgctatgatcttctggtcagaaagaaaagacttattgttctcttcagccactggttacttcatgcctatggaataatctccatttccagagtggataaacttgagcaagatttgccccttttggctttggtacctacaccagcccttttttacttgttcactgcaaaatttaccgaaccttcaaggatactctcagaaggagccaatggacactgagtgtagacatgtgaaatgccaaaaacctgagaagtgctcctaataaaaaagtaaatcaaaaaaaaaaaaaaaaaactcgagggggggcccggtacccaattcgcccnagagtanta

SEQ ID NO: 1758 - DNA, 1369 bp, Homo sapiens
  misc_feature (29)..(29): n equals a,t,g, or c
  misc_feature (32)..(33): n equals a,t,g, or c
taaccctcactaaaggcaacaaaagcggnaannacgcgcctgcaggtcgacactagtggatccaaagaattcggcacgaggaagagagcagctcgcttctaactggactgcacgttggtgacagcgtcccaagctggtgacagacccactctgtaactttcagctagattcagccaccagatcccagaaacatgacccttgctgcctacaaagagaagatgaaggagctcccgctggtgtccttgttctgctcctgcttcctggccgatcccctgaataagtcgtcctacaaatatgaagcagacacggtggacctgaattggtgcgtcatttccgacatggaagtcatcgagctgaacaaatgcacctcgggccaatcctttgaagtcatcctgaagccaccctcctttgatggggttcccgagttcaacgcctccctgccaaggcggcgagacccatccctggaagagatccagaagaaactagaagcggctgaggagcgaaggaagtaccaggaagcggagtcctgaaacacctagcagagaaacgggaacatgagagagaggtgatccaaaaggccattgagggaaaacaacaacttcatcaagatggctaaggaaaaactggcccagaagatggaatccaacaaggagaacagggaggcccacytcgccgccatgttggaacggctgcaagagaaggacaagcacgccgaggaggtgcggaaaaacaaggagctgaaggaagaggcctccaggtaaagcctagaggccaaagaactttccaggtcagccggacagctccagcagctccacgttccaggcagcctcgcccgccggctgcgctcccagcactggggtttggggggaggggggtggccaaggggcgtttcctctgcttttggtgtttgtacatgttaagaattgaccagtgaagccatcctatttgtttccggggaacaatgacggggtgggagaggggagaggagagagtttgggaaagggagatggagaagaactcaaggacattgcaaccctgcccggcgcagatctgattttcacatctctacctggacattgagcctccaggcaccatgttgaggagagatgaaaaccagggcggtagaacttcagggtgaaggacagagtcctgggtggggcagcggctgcagggcgcaccagagaacccagccagagggggtgtgagtaccagtggtgttgcttccaccctgcagcaggtgggatgaggtctgtgtgtgtgtgtgaaccatcattttttgatcatcatgaccaatgaaacattgaaaaaaaaaaaaaaaaaaactsgaggggggcccgtacccaaatcgccgtatatgatcgtaaacatc

SEQ ID NO: 1759 - DNA, 537 bp, Homo sapiens
aattcggcacgagctgccacgcacgactgaacacagacagcagccgcctcgccatgaagctgctgatggtcctcatgctggcggccctcctcctgcactgctatgcagattctggctgcaaactcctggaggacatggttgaaaagaccatcaattccgacatatctatacctgaatacaaagagcttcttcaagagttcatagacagtgatgccgctgcagaggctatggggaaattcaagcagtgtttcctcaaccagtcacatagaactctgaaaaactttggactgatgatgcatacagtgtacgacagcatttggtgtaatatgaagagtaattaactttacccaaggcgtttggctcagagggctacagactatggccagaactcatctgttgattgctagaaaccacttttctttcttgtgttgtctttttatgtggaaactgctagacaactgttgaaacctcaaattcatttccatttcaataaactaactgcaaatcactaaaaaaaaaaaaaaaaaaaaaactcga

SEQ ID NO: 1760 - DNA, 509 bp, Homo sapiens; identical to SEQ ID NO: 391

SEQ ID NO: 1761 - DNA, 1262 bp, Homo sapiens
  misc_feature (544)..(544): n equals a,t,g, or c
  misc_feature (570)..(570): n equals a,t,g, or c
ctgagggggccttcctgcccccccatcagggcttccatcgatttctaggcatcccgtactcccacgaccagggcccctgccagaacctgacctgcttcccgccggccactccttgcgacggtggctgtgaccagggcctggtccccatcccactgttggccaacctgtccgtggaggcgcaccccctggctgcccggactagaggcccgctacatggctttcgcccatgacctcatggccgacgcccagcgccaggatcgccccttcttcctgtactatgcctctmaccacacccactaccctcagttcagtgggcagagctttgcagagcgttcaggccgcgggcatttggggactccctgatggagctggatgcagctgtggggaccctgatgacagccataggggacctggggctgcttgaagagacgctggtcatcttcactgcagacaatggacctgagaccatgcgtatgtcccgaggcggctgctccggtctcttgcggtgtggaaagggaacgacctacgagggcggtgtccgagnagcctgccttggccttctggcaggtncatatcgctcccggcgtgacccacgagctggccagctccctggacctgctgcctaccctggcagccctggctggggccccactgcccaatgtcaccttggatggctttgacctcagccccctgctgctgggcacaggcaagagccctcggcagtctctcttcttctacccgtcctacccagacgaggtccgtggggtttttgctgtgcggastggaaagtacaaggctcacttcttcacccagggctctgccacsagtgataccactgcagaccctgcctgccacgcctccagctctctgactgctcatgagcccccgctgctctatgacctgtccaaggaccctggtgagaactacaacctgctggggggtgtggccggggccacccagaggtgctgcaagccctgaaacagcttcagctgctcaaggcccagttagacgcagctgtgaccttcggccccagccaggtggcccggggcgaggaccccgccctgcagatctgctgtcatcctggctgcaccccccgcccagcttgctgccattgcccagatccccatgcctgagggcccctcggctggcctgggcatgtgatggctcctcactgggagcctgtgggggaggctcaggtgtctggagggggtttgtgcctgataacgtaataacaccagtggagacttgcraaaaaaaaaaaa

SEQ ID NO: 1762 - DNA, 1003 bp, Homo sapiens
  misc_feature (6)..(6): n equals a,t,g, or c
  misc_feature (28)..(28): n equals a,t,g, or c
acgggnaatcccccctcactaattgccnacaaaagccggagctccaccgcggtggcggccgctctagaactagtggwtcccccggkctgcaggaattcggcacgagtgcaaagctccagatttttggggaaagctgtacccaactggactgcccagtgaactgggatcattgagtacagtcgagcacacgtgtgtgcatgggtcaaaggggtgtgttccttctcatcctagatgccttctctgtgccttccacagcctcctgcctgattacaccactgcccccgccccaccctcagccatcccaattcttcctggccagtgcgctccagccttatctaggaaaggaggagtgggtgtagccgtgcagcaagattggggcctcccccatcccagcttctccaccatcccagcaagtcaggatatcagacagtcctcccctgaccctcccccttgtagatatcaattcccaaacagagccaaatactctatatctatagtcacagccctgtacagcatttttcataagttatatagtaaatggtctgcatgatttgtgcttctagtgctctcatttggaaatgaggcaggcttcttctatgaaatgtaaagaaagaaaccactttgtatattttgtaataccacctctgtggccatgcctgccccgcccactctgtatatatgtaagttaaacccgggcaggggctgtggccgtctttgtactctggtgatttttaaaaattgaatctttgtacttgcattgattgtataataattttgagaccaggtctcgctgtgttgctcaggctggtctcaaactcctgagatcaagcaatccgcccacctcagcctcccaaagtgctgagatyacaggcgtgagccaccaccaggcctgattgtaatttttttttttttttttttactggttatgggaagggagaaataaaatcatcaaacccaaaaaaaaaaaaaaaaaaaaaaaaaaaaaaaaaaaaaaaastcgacc

SEQ ID NO: 1763 - DNA, 820 bp, Homo sapiens
gaattcggcacgagccgaggtcggcagcacagagctctggagatgaagaccctgttcctgggtgtcacgctcggcctggccgctgccctgtccttcaccctggaggaggaggatatcacagggacctggtacgtgaaggccatggtggtcgataaggactttccggaggacaggaggcccaggaaggtgtccccagtgaaggtgacagccctgggcggtgggaagttggaagccacgttcaccttcatgagggaggatcggtgcatccagaagaaaatcctgatgcggaagacggaggagcctggcaaatacagcgcctgcttgtccgcagtcgagatggaccagatcacgcctgccctctgggaggccctagccattgacacattgaggaagctgaggattgggacaaggaggccaaggattagatgggggcaggaagctcatgtacctgcaggagctgcccaggagggaccactacatcttttactgcaaagaccagcaccatgggggcctgctccacatgggaaagcttgtgggtaggaattctgataccaaccgggaggccctggaagaatttaagaaattggtgcagcgcaagggactctcggaggaggacattttcacgcccctgcagacgggaagctgcgttcccgaacactaggcagcccccgggtctgcacctccagagcccaccctaccaccagacacagagcccggaccacctggacctaccctccagccatgacccttccctgctcccacccacctgactccaaataaagtccttctcccccaaaaaaaaaaaaaaaaaaactcgtag

SEQ ID NO: 1764 - DNA, 946 bp, Homo sapiens
atgaagaccctgttcctgggtgtcacgctcggcctggccgctgccctgtccttcaccctggaggaggaggatatcacagggacctggtacgtgaaggccatggtggtcgataagactttccggagacaggaggcccagaaggtgtccccagtgaaggtgacagccctgggcggtgggaagttggaagccacgttcaccttcatgagggaggatcggtgcatccagaagaaaatcctgatgcggaagacggaggagcctggcaaaymcagcgcctgtgagcccctcccccactcccacccccaccctcccccaccgccaaccccagtgcaccagcctccacaggtagagagtgcccaggctgcccttttgccagggccccagctctgcccacctccaaggaggggctggcctctccttcctggggggctggtggccctgacatcagacaccgggtgtgacaggcttgtccgcagtcgagatggaccagatcacgcctgccctctgggaggccctagccattgacacattgaggaagctgaggattgggacaaggaggccaaggattagatgggggcaggaagctcatgtacctgcaggagctgcccaggagggaccactacatcttttactgcaaagaccagcaccatgggggcctgctccacatgggaaagcttgtgggtaggaattctgataccaaccgggaggccctggaagaatttaagaaattggtgcagcgcaagggactctcggaggaggacattttcacgcccctgcagacgggaagctgcgttcccgaacactaggcagcccccgggtctgcacctccagagcccaccctaccaccagacacagagcccggaccacctggacctaccctccagccatgacccttccctgctcccacccacctgactccaaataaagtccttctcccccaaaaaaaaaa

SEQ ID NO: 1765 - DNA, 945 bp, Homo sapiens
atgaagaccctgttcctgggtgtcacgctcggcctggccgctgccctgtccttcaccctggaggaggaggatatcacagggacctggtacgtgaaggccatggtggtcgataagactttccggagacaggaggcccagaaggtgtccccagtgaaggtgacagccctgggcggtgggaagttggaagccacgttcaccttcatgagggaggatcggtgcatccagaagaaaatcctgatgcggaagacggaggagcctggcaaatacagcgcctgtgagcccctcccccactcccacccccaccctcccccaccgccaaccccagtgcaccagcctccacaggtagagagtgcccaggctgcccttttgccagggccccagctctgcccacctccaaggaggggctggcctctccttcctggggggctggtggccctgacatcagacaccgggtgtgacaggcttgtccgcagtcgagatggaccagatcacgcctgccctctgggaggccctagccattgacacattgaggaagctgaggattgggacaaggaggccaaggattagatgggggcaggaagctcatgtacctgcaggagctgcccaggagggaccattacatcttttactgcaaagaccagcaccatgggggcgtgctccacatgggaaagcttgtgggtaggaattctgataccaaccgggaggccctggaagaatttaagaaattggtgcagcgcaagggactctcggaggaggacattttcacgcccctgcagacgggaagctgcgttcccgaacactaggcagcccccgggtctgcacctccagagcccaccctaccaccagacacagagcccggaccacctggacctaccctccagccatgacccttccctgctcccacccacctgactccaaataaagtccttctcccccaaaaaaaaa

SEQ ID NO: 1766 - DNA, 1934 bp, Homo sapiens
cagacttcctcagagtccatctccatccccggagcatctgtatgattcagaagtacaaccacgatgggtatggggaccccagaggctttgagggaagcaggtcggctggaggcttttggccaaggggaaagtgtcctaaaggaacccaagtaccaggaagagctggaggacaggctgcatttctacgtggaggaatgtgactacttgcagggcttccagatcctgtgtgacctgcacgatggcttctctggggtaggcgcgaaggcggcagagctgctacaagatgaatattcagggcggggaataataacctggggcctgctacctggtccctaccatcgtggggaggcccagagaaacatctatcgtctattaaacacagcttttggtctcgtgcacctgactgctcacagctctcttgtctgccccttgtccttgggtgggagcctgggcctgcgacccgagccacctgtcagcttcccttacctgcattatgatgccactctgcccttccactgcagtgccatcctggctacagccctggacacagtcactgttccttatcgcctgtgttcctctccagtttccatggttcatctggctgacatgctgagcttctgtgggaaaaaggtggtgacagcaggagcaatcatccctttccccttggctccaggccagtcccttcctgattccctgatgcagtttggaggagccaccccatggaccccactgtctgcatgtggggagccttctggaacacgttgctttgcccagtcagtggtgctgaggggtatagacagagcatgccacacaagccagctcaccccagggacacctccaccctctgcccttcatgcatgtaccactggggaagaaatcttggctcagtatttacaacagcagcagcctggagtcatgagttcttcccatctgctgctgactccctgcagggtggctcctccttacccccacctcttctcaagctgcagtccaccgggtatggttctggatggttcccccaagggagcagcagtggagagcatcccagtgtttggggcactgtgttcctcttcgtccctgcaccagaccctggaagccttggccagagacctcaccaaactcgacttgcggcgctgggccagcttcatggatgctggagtggagcacgatgacgtagcagagctgctgcaggagctacaaagcctggcccagtgctaccagggtggtgacagcctcgtggactaaagttcccagtgtgggagaaaggagctagtttgcaataaaaacagctggatgcaggagcccagtgtcttcatgcagaggagctcaatgtcgcgggactagctacaccaacatatgcactttttacatttagaaacactgtgattagaccacagaacaataaatatgtgccatcagaccaaaaaaaagtagagaaaggagctgaactccactctcgatgctacttacagaggacatctgtaaagtcttcataaaagaccttgaatgatgcctaggatggcagagcccctgggtcctactccatcctccagcctttgtccttgtcctggcctcctgctctccagatctgtaaactgggctcaaggactgtacaagcagagtacaactacccgcctccccggtgccagggcgcctgttgggtttggtcctgtgtagatgattcccagagtctcattcatccagctcctcttcagacagaaggtccccatggtcagacagctggtctgcattgctggtactggttgcatcatcctcatcctcagagctggcttcacaggcagtgtggaagagctgcatgagttctcgaaaatggtgggaaacctaagaaaggaggagggctgtattcactgatccttagtaacatgttaacatttatgaagcactataaaaaaaaaaaaaaaaaaaactcgagg

SEQ ID NO: 1767 - DNA, 1347 bp, Homo sapiens
  misc_feature (78)..(78): n equals a,t,g, or c
ccgtcaggggggcggagcctatggaaaaacgccagcaacgcggcctttttacggttcctggccttttgctggcctttngctcacatgttctttcctgcgttatcccctgattctgtggataaccgtattaccgcctttgagtgagctgataccgctcgccgcagccgaacgaccgagcgcagcgagtcagtgagcgaggaagcggaagagcgcccaatacgcaaaccgcctctccccgcgcgttggccgattcattaatgcagctggcacgacaggtttcccgactggaaagcgggcagtgagcgcaacgcaattaatgtgagttagctcactcattaggcaccccaggctttacactttatgcttccggctcgtatgttgtgtggaattgtgagcggataacaatttcacacaggaaacagctatgaccatgattacgccaagctcgaaattaaccctcactaaagggaacaaaagctggagctccaccgcggtggcggccgctctagaactagtggatcccccgggctgcaggaattcggcacgagcggcacgagatgaatgacaattcccctaaccattcctcttcatatctgcctcttccccttaccatcgtaattctccaaactggtcataaaggcactctgtgaagatattggggactgacatcttaagctctcacctggctgcagtaggaaaggccaaactgacgacaaaaaaaaaattctttataaagatgatatggtaacatgtatctttgccctgggtctgggtgggtccagtcagtctcagatttacaagcatttaggagcctaggtaaaagctgctagtattcttttaaaagttacatttatgacttgcaatgatagaaaactccttccaattaaatggcattttataatattatgtgtgtacttcacagtgttaaaaataccctcatacgttattgcatttgatcttcacagaaagtgcattttaaccagtactctgggtgcaataaataatatgtagaaatttaagtcctccaattccagcatatccagtgagttttgacagtgtgtttatgtggaatgtttaaggatatacaattgtactttatataaattggttcttgttcttcttaaatgtgacatgaaataattgtgctgctacattatactggaaattaacaggggaaaagggaagagctcttggctcccttgaggttctgctagtggtgttaggagtggttacaactgagcttttagtaaccatttaaccgtatgtaaacttggtttctaattaaaaaaaaatttctttttccaaaaaaaaaaaaaaaaaaaaaaawwgctaaagaaaaatacaaag

SEQ ID NO: 1768 - DNA, 2323 bp, Homo sapiens
taaaatagtatggacaaactttgttgaggaaggcagctgattttttgaagggggagtggggttgagagaatgacttgtgcaacccttggtggtagaagatgggcacagctggatgttcaaggaagggagcaggtttgcatttgagaagtgctgtgtgagcagtcatggctcttcaaagagcctggtgagtgatgaccatgttttgtctttcrgggttggcaatgtttgattgcactgggcatgtccttcctggactgtgggcatacggtaagcatctctaaaggcctgctgacagaagaagccacccgtggctacgttaaataacactggattagtctgtcttctgcaggtagccatcagagccagtgtgtttctatggtttactgtgtgaacatagccaaaagtatgtgccgttgcacagactgtgtttatgactcaaccgttggttggaaaagactttgtttcatgtgtatttgaaagatggaattattttttccttcctgacctaaccttagaactggattagggtgggatctttgaaaagctgacatttgctgctatcattccaacactaaattcttaagtagttgcccaagggccagctcagtttatccttcggagagacaaggatatgcatgattcttaaccaggctatatgttaaaaaaaaattggaaaatgcaatacattttttattatacaaactacagaatgagtatgcaagttttatttatcaaaatgtaatggatttttaaaggctgagaaattttccttatacctaccttttcagttattttaattataccaaattatcaactagaatagcttcatccatatgaaatataaaatgaagagacacctagctctatcaggcttaggattctttgaacttatttccactttaatttctcagtggaagttaagaggggtgagaaaacaaagaaggggaaaaactgacaactaacaaaaccagcaccacatcgctaggtggtgcttactaattaccttctcaggattttcctcagattgaaaagcttatgaggatttcttgggagtcttaataacctgcctgttagtacagagctttcctgatgatatttactcttgagcacatgtggttgtaaaaccttaactttctttctccaggagggtggtgatagaaacagatggtagtatttatgaactgatgttctcgtgaaatgttgagggtggggagaaaagactttaagggaggagagccatctattttgttcctaaagccacctctcagcagaatcgtcatgtttttctgatgcaccgctctgcttcatgcccaagatgacttgcgaggcaatctcaggagctgtggacttaaccattgcaaagcacactgtctttctcagcgttctctgcaagtcagtaggtgttagtatggttgcaaagttcactgtctcagcaaagttgaactgggctacctctctacagctgtttcctcagagggaaaaatcttgagaccagatggtggagctctggagtcagaggaaatgggtgtcttcagcacaaagctgctgcttttacttcagccacttctgacatttttacataccgagcctgagattgtgtgattatctcaaatcaaatcactttgatggagataaataatcaaaactgttttatagtcattgatttggtgagaacagtaatggaaaatggtgttgaaggacttctcatttttggagctttccttccagagtcctggctgattggtgttcgctgttcatctgagcccccaaaagcattattactgatacttgcacacagtcaaaagcgcagactggatggatggtcttttataaggcatttaagggtacactactgtgtttcactgaccatacatttttcttagcccctcaagtaatatagcacagagttatgaatgacaattcccctaaccattcctcttcatatctgcctcttccccttaccatcgtaattctccaaactggtcataaaggcactctgtgaagatattggggactgacatcttaagctctcacctggctgcagtaggaaaggccaaactgacgacaaaaaaaaaattctttataaagatgatatggtaacatgtatctttgccctgggtctgggtgggtccagtcagtctcagatttacaaagcatttaggagcctagggwaaaagctgctagtattcttttaaaaagttatattatgacttgcaatgatagaaaactccytccaattaaatggcattttataatattatgkgkgtacttcacaggggtaaaaataccctcatmcggtawtgsattkgrtcttcacagaaag

SEQ ID NO: 1769 - DNA, 1149 bp, Homo sapiens
  misc_feature (1135)..(1135): n equals a,t,g, or c
  misc_feature (1138)..(1139): n equals a,t,g, or c
  misc_feature (1141)..(1144): n equals a,t,g, or c
  misc_feature (1146)..(1147): n equals a,t,g, or c
gcacctgtcayagtccagccttctgctggagcacttgctcagctcctgggagcagattcccaagaaggtacagaagtctttgcaagaaaccattcagtccctcaagcttaccaaccaggagctgctgaggaagggtagcagtaacaaccaggatgtcgtcwcctgtgacatggcctgcaagggcctgttgcagcaggttcagggtcctcggctgccctggacgcggctcctcctgttgctgctggtcttcgctgtaggcttcctgtgccatgacctccggtcacacagctccttccaggcctcccttactggccggttgcttcgatcatctggcttcttacctgctagccaacaagcgtgtgccaagctctactcctacagtctgcaaggctacagctggctgggggagacactgccgctctggggctcccacctgctcaccgtggtgcggcccagcttgcagctggcctgggctcacaccaatgccacagtcagcttcctttctgcccactgtgcctctcaccttgcgtggtttggtgacagtctcaccagtctctctcagaggctacagatccagctccccgattccgtgaatcagctactccgctatctgagagagctgcccctgcttttccaccagaatgtgctgctgccactgtggcacctcttgcttgaggccctggcctgggcccaggagcactgccatgaggcatgcagaggtgaggtgacctgggactgcatgaagacacagctcagtgaggctgtccactggacctggctttgcctacaggacattacagtggctttcttggactgggcacttgcccctgatatcccagcagtaggccctgccttcctggccactgatttctgcatgggtagaccatccaagactgcagcgggtagaaggtggcagtttcttcatgggagtcttttttaacttggtgcctgaagttctctcctaggcaaggtggccagttgcctccagctcagattcttcccatctttgggtggggacagggcccagcaggcatctcaagctcctacccaacaatgccactgaaccacttttctggccctatggacatggcccagccccatccttgtggctgtagctctcaaatccggcttgccntanntnnnngnnta

SEQ ID NO: 1770 - DNA, 1943 bp, Homo sapiens
cccagcgtccgcccacgcgtccggtgtctttaagaggtggaacggggcttcgcgtctgtgcttcctgtggctgacgtcatctggaggagatttgctttctttttctccaaaaggggaggaaattgaaactgagtggcccacgatgggaagaggggaaagcccaggggtacaggaggcctctgggtgaaggcagaggctaacatggggttcggagcgaccttggccgttggcctgaccatctttgtgctgtctgtcgtcactatcatcatctgcttcacctgctcctgctgctgcctttacaagacgtgccgccgaccacgtccggttgtcaccaccaccacatccaccactgtggtgcatgccccttatcctcagcctccaagtgtgccgcccagctaccctggaccaagctaccagggctaccacaccatgccgcctcagccagggatgccagcagcaccctacccaatgcagtacccaccaccttacccagcccagcccatgggcccaccggcctaccacgagaccctggctggaggagcagccgcgccctaccccgccagccagcctccttacaacccggcctacatggatgccccgaaggcggccctctgagcattccctggcctctctggctgccacttggttatgttgtgtgtgtgcgtgagtggtgtgcaggcgcggttccttacgccccatgtgtgctgtgtgtgtccaggcacggttccttacgccccatgtgtgctgtgtgtgtcctgcctgtatatgtggcttcctctgatgctgacaaggtggggaacaatccttgccagagtgggctgggaccagactttgttctcttcctcacctgaaattatgcttcctaaaatctcaagccaaactcaaagaatggggtggtggggggcaccctgtgaggtggcccctgagaggtgggggcctctccagggcacatctggagttcttctccagcttaccctagggtgaccaagtagggcctgtcacaccagggtggcgcagctttctgtgtgatgcagatgtgtcctggtttcggcagcgtagccagctgctgcttgaggccatggctcgtccccggagttgggggtacccgttgcagagccagggacatgatgcaggcgaagcttgggatctggccaagttggactttgatcctttgggcagatgtcccattgctccctggagcctgtcatgcctgttggggatcaggcagcctcctgatgccagaacacctcaggcagagccctactcagctgtacctgtctgcctggactgtcccctgtccccgcatctcccctgggaccagctggagggccacatgcacacacagcctagctgcccccagggagctctgctgcccttgctggccctgcccttcccacaggtgagcagggctcctgtccaccagcacactcagttctcttccctgcagtgttttcattttattttagccaaacattttgcctgttttctgtttcaaacatgatagttgatatgagactgaaacccctgggttgtggagggaaattggctcagagatggacaacctggcaactgtgagtccctgcttcccgacaccagcctcatggaatatgcaacaactcctgtaccccagtccacggtgttctggcagcagggacacctgggccaatgggccatctggaccaaaggtggggtgtggggccctggatggcagctctggcccagacatgaatacctcgtgttcctcctccctctattactgtttcaccagagctgtcttagctcaaatctgttgtgtttctgagtctagggtctgtacacttgtttataataaatgcaatcgtttggaaaaaaaaaaaaaaaaaaaaaaaaaaaaaaaaaaaaaaaaaaaaaaaaaaaaaaaaaaaaaaaaaaaaaaaaaaaaaaaaaaaaaaaaaaaaaaaaaa

SEQ ID NO: 1771 - DNA, 1971 bp, Homo sapiens
cccgtggactcagcctcttccccgactcctgtccagatttctgctgctggtacctgtccggcaatactgcgtcgacccacggttgaaatttgtgtggagcgaggaaatgtgctggccgacccacgcgtccgggaaattgaaactgattggcccacgatgggaagaggggaaagcccaggggtacaggaggcctctgggtgaaggctgaggctaacatggggttcggagcgaccttggccgttggcctgaccatctttgtgctgtctgtcgtcactatcatcatctgcttcacctgctcctgctgctgcctttacaagcacgtgccgccgaccacgtccggttgtcaccaccaccacatccaccactgtggtgcatgccccttatcctcagcctccaagtgtgccgcccagctaccctggaccaagctaccagggctaccacaccatgccgcctcagccagggatgccagcagcaccctacccaatgcagtacccaccaccttacccagcccagcccatgggcccaccgggcctaccacgagaccctggctgggggagcagccgcgccctaccccgccagccagcctccttacaaccccggcctacatggatgcccccgaaggcgggcctctgagcattccctgggctctcttggctgccacttggttatgttgtctgtgtgcgtgagtggtgtgcaggcgtcggttccttacgcccccatgtgtgctgtgtgttgtccaggccacgggttccttacgccccatgtggtggctgtgtgtgttcctgcctgttagatggtggcttcctctgatgctgcacaaggtggggaacaaccctccttgcccgcaccgggctggggaacctcgactttgttctcttcctcacctgaaattatgcttcctaaaaatctcaagccaaactcaaagaatggggtggtggggggcaccctgtgaggtggcccctgagaggtgggggcctctccagggcacatctggagttcttctccagcttaccctagggtgaccaagtagggcctgtcacaccagggtggcgcagctttctgtgtgatgcagatgtgtcctggtttcggcagcgtagccagctgctgcttgaggccatggctcgtccccggagttgggggtacccgttgcagagccagggacatgatgcaggcgaagcttgggatctggccaagttggactttgatcctttgggcagatgtcccattgctccctggacagcctgtccggaagcctgtctggggatcaggcagcctcctgatgccagaacacctcaggcagagccctactcagctgtacctgtctgcctggactgtcccctgtccccgcatctcccctgggaccagctggagggccacatgcacacacagcctagctgcccccagggagctctgctgcccttgctggccctgcccttcccacaggtgagccagggctcctgtccaccaagcacaactcagttctcttccctgcagtgttttcattttattttagccaaacattttgcctgttttctgtttcaaacatgatagttgatatgagactgaaacccctgggttgtggagggaaattggctcagagatggacaacctgggcaactgtgagtccctgcttcccgacaccagcctcaatggaaatatggcaacaactcctgtaccccaagtccacgggtgttctggcaagcaaggggaacaacctggggccaatgggccaatctgggaccaaagggtggggtgtggggccctggatggcaagttctggcccagacatgaatacctcgtgttcctcctccctttattactgtttcaccagagctgttttagctcaaatttgttgtgtttttgactttagggtttgaacacttgtttaataataaaatgcaattgtttgggaaaaaaaaaaaaaaaaaaaaaaaaaaaaaaaaaaaaaaaaaaaaaaaaaaaaaaaaaaaa

SEQ ID NO: 1772 - DNA, 2471 bp, Homo sapiens
  misc_feature (42)..(42): n equals a,t,g, or c
  misc_feature (1932)..(1932): n equals a,t,g, or c
  misc_feature (1957)..(1957): n equals a,t,g, or c
  misc_feature (1983)..(1983): n equals a,t,g, or c
  misc_feature (1989)..(1989): n equals a,t,g, or c
  misc_feature (2003)..(2003): n equals a,t,g, or c
  misc_feature (2018)..(2018): n equals a,t,g, or c
ggcacgagtatggcttcccgtggactcagcctcttccccgantcctggcacgagggggcttcgcgtctgtgcttcctgtggctgacgtcatctggaggagatttgctttctttttctccaaaaggggaggaaattgaaactgagtggcccacgatgggaagaggggaaagcccaggggtacaggaggcctctgggtgaaggcagaggctaacatggggttcggagcgaccttggccgttggcctgaccatctttgtgctgtctgtcgtcactatcatcatctgcttcacctgctcctgctgctgcctttacaagacgtgccgccgaccacgtccggttgtcaccaccaccacatccaccactgtggtgcatgccccttatcctcagcctccaagtgtgccgcccagctaccctggaccaagctaccagggctaccacaccatgccgcctcagccagggatgccagcagcaccctacccaatgcagtacccaccaccttacccagcccagcccatgggcccaccggcctaccacgagaccctggctggagagcagccgcgccctaccccgccagccagcctccttacaacccggcctacatggatgccccgaaggcggccctctgagcattccctggcctctctggctgccacttggttatgttgtgtgtgtgcgtgagtggtgtgcaggcgcggttccttacgccccatgtgtgctgtgtgtgtccaggcacggttccttacgccccatgtgtgctgtgtgtgtcctgcctgtatatgtggcttcctctgatgctgacaaggtggggaacaatccttgccagagtgggctgggaccagactttgttctcttcctcacctgaaattatgcttcctaaaatctcaagccaaactcaaagaatggggtggtggggggcaccctgtgaggtggcccctgagaggtgggggcctctccagggcacatctggagttcttctccagcttaccctagggtgaccaagtagggcctgtcacaccagggtggcgcagctttctgtgtgatgcagatgtgtcctggtttcggcagcgtaccagctgctgcttgaggccatggctccgtccccggagttgggggtacccgttgcagagccagggacatgatgcaggcgaagttggggatctggccaagttggactttgatcctttgggcagatgtcccattgctccctggagcctgtcatgcctgttggggatcaggcagcctcctgatgccagaacacctcaggcagagccctactcagctgtacctgtctgcctggactgtcccctgtccccgcatctcccctgggaccagctggagggccacatgcacacacagcctagctgcccccagggagctctgctgcccttgctggccctgcccttcccacaggtgagcagggctcctgtccaccagcacactcagttctcttccctgcagtgttttcattttattttagccaaacattttgcctgttttctgtttcaaacatgatagttgatatgagactgaaacccctgggttgtggagggaaattggctcagagatggacaacctggcaactgtgagtccctgcttcccgacaccagcctcatggaatatgcaacaactcctgtaccccagtccacggtgttctggcagcagggacacctgggccaatgggccatctggaccaaaggtggggtgtggggccctggatggcagctctggcccagacatgaatacctcgtgttcctcctccctctattactgtttcaccagagctgtcttagctcaaatctgttgtgtttctgagtctagggtctgtacacttgtttataataaatgcaatcgtttggaaaaaaaaaaaaaaaaaactcgtagggggggcccgtacccaatgggcycmmaratagtagarwacraaaayamcaantgcaaccaaagaggggccagggganttttaagagggcccccttttgggggnatccantttagccggggttnttaagggaagttgcntggcgggggttagggcccsgttkytwcttccaaccaagggttytygtggttaggccgggttgggcccmatgggctgggctgggtaaagtggtgggtmaytgcmattgggtagggtgctgctggcattcctggctgaggcggcatggtgtggtagccctggtagcttggtccagggtagctgggcggcacacttggaggctgaggataaggggcatgcacccacagtggtggatgtggtggtggtgacaaccggacgtggtcggcggcacgtcttgtaaaggcagcagcaggagcaggtgaagcagatgatgatagtgacgacagacagcacaaagatggtccagccaacggccaaggtcgctccgaaccccatgttagcctctgccttcacccagaggcctcctgtacccctgggctttcccctcttcccatcgtgggccactcactcgtgcc

SEQ ID NO: 1773 - DNA, 457 bp, Homo sapiens
  misc_feature (456)..(456): n equals a,t,g, or c
ggcacgakccaaatcactcattgtgaaagctgagctcacagccgaataagccaccatgaggctgtcagtgtgtctcctgatggtctcgctggccctttgctgctaccaggcccatgctcttgtctgcccagctgttgcttctgagatcacagtcttcttattcttaagtgacgctgcggtaaacctccaagttgccaaacttaatccacctccagaagctcttgcagccaagttggaagtgaagcactgcaccgatcagatatcttttaagaaacgactctcattgaaaaagtcctggtggaaatagtgaaaaaatgtggtgtgtgacatgtaaaaatgctcaacctggtttccaaagtctttcaacgacaccctgatcttcactaaaaattgtaaaggtttcaacacgttgctttaataaatcacttgccctgcamawmaaaaaaaaaaaaaacnc

SEQ ID NO: 1774 - DNA, 2517 bp, Homo sapiens
  misc_feature (2517)..(2517): n equals a,t,g, or c
ggcagagcacttcctggccaggaaacctgagcggtgagactcccagctgcctacatcaaggccccaggacatgcagaaccttcctctagaacccgacccaccaccatgaggtcctgcctgtggagatgcaggcacctgagccaaggcgtccagtggtccttgcttctggctgtcctggtcttctttctcttcgccttgccctcttttattaaggagcctcaaacaaagccttccaggcatcaacgcacagagaacattaaagaaaggtctctacagtccctggcaaagcctaagtcccaggcacccacaagggcaaggaggacaaccatctatgcagagccagtgccagagaacaatgccctcaacacacaaacccagcccaaggcccacaccaccggagacagaggaaaggaggccaaccaggcaccgccggaggagcaggacaaggtgccccacacagcacagagggcagcatggaagagcccagaaaaagagaaaaccatggtgaacacactgtcacccagagggcaagatgcagggatggcctctggcaggacagaggcacaatcatggaagagccaggacacaaagacgacccaaggaaatgggggccagaccaggaagctgacggcctccaggacggtgtcagagaagcaccagggcaaagcggcaaccacagccaagacgctcattcccaaaagtcagcacagaatgctggctcccacaggagcagtgtcaacaaggacgagacagaaaggagtgaccacagcagtcatcccacctaaggagaagaaacctcaggccaccccaccccctgcccctttccagagccccacgacgcagagaaaccaaagactgaaggccgccaacttcaaatctgagcctcggtgggattttgaggaaaaatacagcttcgaaataggaggccttcagacgacttgccctgactctgtgaagatcaaagcctccaagtcgctgtggctccagaaactctttctgcccaacctcactctcttcctggactccagacacttcaaccagagtgagtgggaccgcctggaacactttgcaccaccctttggcttcatggagctcaactactccttggtgcagaaggtcgtgacacgcttccctccagtgccccagcagcagctgctcctggccagcctccccgctgggagcctccggtgcatcacctgtgccgtggtgggcaacgggggcatcctgaacaactcccacatgggccaggagatagacagtcacgactacgtgttccgattgagcggagctctcattaaaggctacgaacaggatgtggggactcggacatccttctacggctttaccgccttctccctgacccagtcactccttatattgggcaatcggggtttcaagaacgtgcctcttgggaaggacgtccgctacttgcacttcctggaaggcacccgggactatgagtggctggaagcactgcttatgaatcagacggtgatgtcaaaaaaccttttctggttcaggcacagaccccaggaagcttttcgggaagccctgcacatggacaggtacctgttgctgcacccagactttctccgatacatgaagaacaggtttctgaggtctaagaccctggatggtgcccactggaggatataccgccccaccactggggccctcctgctgctcactgcccttcagctctgtgaccaggtgagtgcttatggcttcatcactgagggccatgagcgcttttctgatcactactatgatacatcatggaagcggctgatcttttacataaaccatgacttcaagctggagagagaagtctggaagcggctacacgatgaagggataatccggctgtaccagcgtcctggtcccggaactgccaaagccaagaactgaccggggccagggctgccatggtctccttgcctgctccaaggcacaggatacagtgggaatcttgagactctttggccatttcccatggctcagactaagctccaagcccttcargagttccaagggaacacttgaaccatggacaagactctctcaagatggcaaatggctaattgaggttctgaagttcttcagtacattgctgtaggtcctgaggccagggatttttaattaaatggggtgatgggtggccaataccacaattcctgctgaaaaacactcttccagtccaaaagcttcttgatacagaaaaaagagcctggatttacagaaacatatagatctggtttgaattccagatcgagtttacagttgtgaaatcttgaaggtattacttaacttcactacagattgtctagaagacctttctaggagttatctgattctagaagggtctatacttgtccttgtctttaagctatttgacaactctacgtgttgtagaaaactgataataatacaaatgattgttgtccatggaaaggcaaataaattttctacagtgaaaaaaaaaaaaaaaaaaaaaaaaaaaaaaaaaaaaaaaaaaan

SEQ ID NO: 1775 - DNA, 453 bp, Homo sapiens
ctgcaggaattcggcacgagctcgtgccgaattcggcacgaggacatttcatataatggagtcatgtaatatgtagtctcttgcctgtatcttctttcacttacataatgcttgtgaggtttacccatgttgcacatgtatcagtatttcactcctttttattgctgagtaatattccattgtgttcattcaccagttggtggacatttggatcattttccctttggaattattaggaataatattgctatgaacattaatgttaaagtctgttttattgtttttgtttttgtttttttgttttttattgttgttgtttttgagawggggtcttgcycygtcacccaagctggagtgcagtggcatgatctwggytcactgcaacctccagctcccaggttcaagcaattctcctgcctcagcctcccgagtagctgggattataggctcgag

SEQ ID NO: 1776 - DNA, 415 bp, Homo sapiens; identical to SEQ ID NO: 401

SEQ ID NO: 1777 - DNA, 2046 bp, Homo sapiens
  misc_feature (1)..(1): n equals a,t,g, or c
ngaagaacacagatattggaaattcttgctctaatcttacctaagggtgtattagtcagtgctgttttagttgcaaaaactaaaaactcaactcaaattagtcatggaagaaaggaatttattggctgagcagcggagaagttaaatcctgaggtgaatttggggctcccaagatgtctgggcctcctcactccccctcttccagctccacccctgatcactggcatcatttcctggccaggcccttctctagccttcagtgtggcaagagagcagtttcatttccggctatctcagagcactgcattcaacagaaaacaaagcaagccctttccttggagtttacaaatgactcaggattcactctgatttgaccaagagtcagaaccctaattggccaagcctgaagtcacttgtctacccctgatactgggaatagaatgcatggatgagagggaggtgggtggttccaygaraaggaaattcaagcacttttcctaaaagaagggggaatggatgctgaaacaacacgtytcccacaaagggagcagacactgggcttgtgaagctgccccataccttccccacagaactggggtccggcctccctgacatgcagatttccacccagaagacagagaaggagccagtggtcatggaatgggctggggtcaaagactgggtgcctgggagctgaggcagccaccgtttcagcctggccagccctctggaccccgaggttggaccctactgtgacacacctaccatgcggacactcttcaacctcctctggcttgccctggcctgcagccctgttcacactaccctgtcaaagtcagatgccaaaaaagccgcctcaaagacgctgctggagaagagtcagttttcagataagccggtgcaagaccggggtttggtggtgacggacctcaaagctgagagtgtggttcttgagcatcgcagctactgctcggcaaaggcccgggacagacactttgctggggatgtactgggctatgtcactccatggaacagccatggctacgatgtcaccaaggtctttgggagcaagttcacacagatctcacccgtctggctgcagctgaagagacgtggccgtgagatgtttgaggtcacgggcctccacgacgtggaccaagggtggatgcgagctgtcaggaagcatgccaagggcctgcacatagtgcctcggctcctgtttgaggactggacttacgatgatttccggaacgtcttagacagtgaggatgagatagaggagctgagcaagaccgtggtccaggtggcaaagaaccagcatttcgatggcttcgtggtggaggtctggaaccagctgctaagccagaagcgcgtgggcctcatccacatgctcacccacttggccgaggctctgcaccaggcccggctgctggccctcctggtcatcccgcctgccatcacccccgggaccgaccagctgggcatgttcacgcacaaggagtttgagcagctggcccccgtgctggatggtttcagcctcatgacctacgactactctacagcgcatcagcctggccctaatgcacccctgtcctgggttcgagcctgcgtccaggtcctggacccgaagtccaagtggcgaagcaaaatcctcctggggctcaacttctatggtacatccagacactgaaggaccacaggccccggatggtgtgggacagccaggcctcagagcacttcttcgagtacaagaagagccgcagtgggaggcacgtcgtcttctacccaaccctgaagtccctgcaggtgcggctggagctggcccgggagctgggcgttggggtctctatctgggagctgggccagggcctggactacttctacgacctgctctaggtgggcattgcggcctccgcggtggacgtgttcttttctaagccatggagtgagtgagcaggtgtgaaatacaggcctccactccgtttgctgtaaaaaaaaaaaaaaaaaaaaaaaaaaaaaaaaaaaaaaaaaaaaaaaaaactcgag

SEQ ID NO: 1778 - DNA, 855 bp, Homo sapiens
  misc_feature (73)..(73): n equals a,t,g, or c
ctcgagttttttttttttttttttttttttttttttttttttttttttttttttttcacagcaaacggagtgnaggcctgtatttcacacctgctcactcactccatggcttagaaaagaacacgtccaccgcggaggccgcaatgcccacctagagcagktcgtagaagtagtccaggccctggcccagytcccagatagagaccccaacgcccagctcccgggccagytccagccgcacctgcagggacttcagggttgggtagaagacgacgtgcctcccaytgcggytcctggccccgacaacaggctcacgggcatccttgraggtcgcgtagtccataccatagaagttgagccccaggaggattttgcttcgccacttggacttcgggtccaggacctggacgcaggctcgaacccaggacaggggtgcattagggccaggctgatgcgctgtagagtagtcgtaggtcatgaggctgaaaccatccagcacgggggccagctgctcaaactccttgtgcgtgaacatgcccagctggtcggtcccgggggtgatggcaggcgggatgaccaggagggccagcagccgggcctggtgcagagcctcggccaagtgggtgagcatgtggatgaggcccacgcgcttctggcttagcagctggttccagacctccaccacgaagccatcgaaatgctggttctttgccacctggaccacggtcttgctcagctcctctatctcatcctcactgtctaagacgttccggaaatcatcgtaagtccagtcctcaaacaggagccgaggcactatgtgcaggcccttggcatgcttcctgacagctaagcatc

SEQ ID NO: 1779 - DNA, 1387 bp, Homo sapiens
gcgctggagcgttttccggccgtgcgtttgtggccgtccggcctccctgacatgcagccctctggaccccgaggttggaccctactgtgacacacctaccatgcggacactcttcaacctcctctggcttgccctggcctgcagccctgttcacactaccctgtcaaagtcagatgccaaaaaagccgcctcaaagacgctgctggagaagagtcagttttcagataagccggtgcaagaccggggtttggtggtgacggacctcaaagctgagagtgtggttcttgagcatcgcagctactgctcggcaaaggcccgggacagacactttgctggggatgtactgggctatgtcactccatggaacagccatggctacgatgtcaccaaggtctttgggagcaagttcacacagatctcacccgtctggctgcagctgaagagacgtggccgtgagatgtttgaggtcacgggcctccacgacgtggaccaagggtggatgcgagctgtcaggaagcatgccaagggcctgcacatagtgcctcggctcctgtttgaggactggacttacgatgatttccggaacgtcttagacagtgaggatgagatagaggagctgagcaagaccgtggtccaggtggcaaagaaccagcatttcgatggcttcgtggtggaggtctggaaccagctgctaagccagaagcgcgtgggcctcatccacatgctcacccacttggccgaggctctgcaccaggcccggctgctggccctcctggtcatcccgcctgccatcacccccgggaccgaccagctgggcatgttcacgcacaaggagtttgagcagctggcccccgtgctggatggtttcagcctcatgacctacgactactctacagcgcatcagcctggccctaatgcacccctgtcctgggttcgagcctgcgtccaggtcctggacccgaagtccaagtggcgaagcaaaatcctcctggggctcaacttctatggtatggactacgcgacctccaaggatgcccgtgagcctgttgtcggggccaggtacatccagacactgaaggaccacaggccccggatggtgtgggacagccaggcctcagagcacttcttcgagtacaagaagtgagtgttttgaagagccgcagtgggaggcacgtcgtcttctacccaaccctgaagtccctgcaggtgcggctggagctggcccgggagctgggcgttggggtctctatctgggagctgggccagggcctggactacttctacgacctgctctaggtgggcattgcggcctccgcggtggacgtgttcttttctaagccatggagtgagtgagcaggtgtgaaatacaggcctccactccgtttgc

SEQ ID NO: 1780 - DNA, 977 bp, Homo sapiens; identical to SEQ ID NO: 848

SEQ ID NO: 1781 - DNA, 796 bp, Homo sapiens
  misc_feature (9)..(9): n equals a,t,g, or c
  misc_feature (24)..(24): n equals a,t,g, or c
  misc_feature (736)..(736): n equals a,t,g, or c
  misc_feature (770)..(770): n equals a,t,g, or c
gaccctatntaaggttcgcctgcnggtaccggtccggaattcccgggtcgacccacgcgtccgtgctgagtatggaggctggtacaaggcctgcaaagtgagcagccccacagtgaacactactctgagaaacctgggagctctgtataggcgccagggaaagctggaggctgctgagaccctggaggaatgtgccctgcggtcccggagacagggcactgaccctatcagccagacgaaggtggcagagctgcttggggagagtgatggtagaaggacctcccaggagggccctggagacagtgtgaaattcgagggaggtgaagatgcttctgtggctgtggagtggtccggggatggcagtgggaccctgcagaggagtggctctcttggcaagatccgggatgtgctccgcagaagcagtgaactcttggtgaggaagctccaggggactgagcctcggccctccagcagcaacatgaagcgagcagcctccttgaactatctgaaccaacctagtgcagcacccctccaggtctcccggggcctcagtgccagcaccatggacctctcttcaagcagctgacattcaacccggcccccaggtctgctgggtccccccacccccacagcctcacagcattcccattgstctggctcttccccacctagtgggacagtgaagggagcagttaccagaagatgtgtgccttagggctagtcctctmagatcctntagaagacctaggaacctttgactggcttaagantgttagccagggacagagatgctaaa

SEQ ID NO: 1782 - DNA, 1268 bp, Homo sapiens
  misc_feature (1191)..(1191): n equals a,t,g, or c
  misc_feature (1210)..(1210): n equals a,t,g, or c
  misc_feature (1223)..(1223): n equals a,t,g, or c
  misc_feature (1231)..(1231): n equals a,t,g, or c
  misc_feature (1261)..(1261): n equals a,t,g, or c
gagctgaacaacctggccctcttgtgccaaaaccagggcaagtatgaggccgtggaacgctactaccagykwkcactggccatctacgaggggcagctggggccggacaaccctaatgtagcccggaccaagaacaacctggcttcctgttacctgaaacagggcaaatatgctgaggctgagacactatacaaagagatcctgacccgtgcccatgtacaggagtttgggtctgtggatgatgaccacaagcccatctggatgcatgcagaggagcgggaggaaatgagcaaaagccggcaccatgagggtgggacaccctatgctgagtatggaggctggtacaaggcctgcaaagtgagcagccccacagtgaacactactctgagaaacctgggagctctgtataggcgccagggaaagctggaggctgctgagaccctggaggaatgtgccctgcggtcccggagacagggcactgaccctatcagccagacgaaggtggcagagctgcttggggagagtgatggtwgaaggacctcccaggagggccctggagacagtgtgaaattcgagggaggtgaagatgcttytgtggctgtggagtggtccggggatggcagtgggaccctgcagaggagtggctctyttggcaagatccgggatgtgctccgcagaagcastgaactcttggtgaggaagctccaggggactgagcctcggccctccagcagcaacatgaagcgagcagcctccttgaactatctgaaccaacctagtgcagcacccctccaggtctcccggggcctcagtgccagcaccatggacctctcttcaagcagctgacattcaacccggcccccaggtctgctgggtccccccacccccacagccctcacagcattccccattgctcctggctcttccccacccctaggtgggacagtgaaggggagcagtttaaccagaagattgctgctgcccttagggtctcagctccctcctcaggaatccctcttaggaaggaccctcaggacaccctctctgcaccctgtggtcctctagagtagctagctctgaggccccaaggtgggtacaaagcaggtatggccctcagagatgcagcctgctgctggcttttcaagtcagagggttgggggctggccagccaagctgccttgccctggccgntcttacttccttcctctgntggcttacttcangtccatgnatttcacttttcttaaataaaaagaatcanggaaaaa

SEQ ID NO: 1783 - DNA, 1961 bp, Homo sapiens
  misc_feature (1378)..(1378): n equals a,t,g, or c
  misc_feature (1952)..(1952): n equals a,t,g, or c
  misc_feature (1957)..(1957): n equals a,t,g, or c
gcggcacgasamgagcggcagccacaccggcagattgcagaccgggcaaggtcccccaggccaggatgtcaggcctggtgttggggcagcgggatgagcctgcaggccaccggctcagccaagaggagatcctggggagcacacggctggtcagccaagggctagaggccctacgcagtgaacaccaggccgtgctgcaaagcctgtcccagaccattgagtgtctgcagcagggaggccatgaggaagggctggtgcatgagaaggcccggcagcttcgccgttctatggaaaacattgagctcgggctgagtgaggcccaggtgatgctggctctagccagccacctgagcacagtggagtcggagaaacagaagctgcgggctcaggtgcggcggctatgccaggagaaccagtggctgcgggatgagctggctggcacccagcagcggctacagcgcagtgaacaggctgtggctcagctggaggaggaaaagaagcacctggagttcctggggcagctgcggcagtatgatgaggatggacatacctcggaggagaaagaaggcgatgccaccaaggattccctggatgacctctttcctaatgaggaggaagaggaccccagcaatggcttgtcccgtggtcaaggtgctacagcagctcagcagggtggatatgagatcccagcaaggttgcggacgttgcacaacctggtgatccagtacgcakcccaaggtcgctatgaggtggccgtgccactctgtaagcaggcactagaggacytggagcgcacatcaggccgtggccaccctgatgtcgccaccatgctcaacatccttgctttggtgtatcgtgaccagaataagtataaggaagctgcccacctgctgaatgatgcccttagcatccgggagagcaccttgggacctgaccatcctgctgtggctgccacactcaacaatttggctgtgctctatggcaaaaggggcaagtacaaggaggcagagcctctgtgccagcgggcactggagattcgagaaaaggtcctgggcacgaatcatccagatgtggcaaaacagctgaacaacctggccctcttgtgccaaaaccagggcaagtatgaggccgtggaacgctactaccagcgagcactggccatctacgaggggcagctggggccggacaaccctaatgtagcccggaccaagaacaacctggcttcctgttacctgaaacagggcaaatatgctgaggctgagacactatacaaagagatcctgacccgtgcccatgtacaggagtttgggtctgtggatgatgaccacaagcccatctggatgcatgcagaggagcgggaggaaatgagcaaaagccnggcaccatgagggtgggacactatgctgagtatggaggctggwacaaggcctgcaaagtgagcagccccacagtgaacactactctgagaaacctgggagctctgtataggcccccaggtmtgctgggtccccccacccccacagccctcacagcattccccattgctcctggctcttccccacccctaggtgggacagtgaaggggagcagtttaaccagaagattgctgctgcccttagggtctcagctccctcctcaggaatccctcttaggaaggaccctcaggacaccctctctgcaccctgtggtcctctagagtagctagctctgaggccccaaggtgggtacaaagcaggtatggccctcagagatgcagcctgctgctggcttttcagtcagagggttgggggctggccagccaagctgccttgccctggccgctcttactccctccctctgctgtctcacttcaggtccatgtatttcacttttcttaaataaaagaatcaggtaaccttaaaaaaaaaaaaaaaaaaaaacttggggggggccccgaacccaatttgccccanagggnggcg

SEQ ID NO: 1784 - DNA, 632 bp, Homo sapiens
  misc_feature (3)..(4): n equals a,t,g, or c
  misc_feature (7)..(7): n equals a,t,g, or c
  misc_feature (20)..(20): n equals a,t,g, or c
  misc_feature (555)..(555): n equals a,t,g, or c
  misc_feature (561)..(561): n equals a,t,g, or c
tgnnatngaaattcctggcnccttggaatttggcmctaaaggatggatcctwtatacmccattcagcaacttgctttcctcatttaatgatataycttatagaycttccaatayctgcacatacagacccacttccttccggtttcatagaagtgacataattcaactagtyccycattgakgaakgtcctgcttttttccctattgcaaataatactgcaatatcattgtgtgtatgtattatgcatgtatgttcatcttggcaaactttgaaaatatatccttatagtaaattacatgcatttagaagttttgatgcaagtggagaattgccattcacaatgttcccatcaatttatatatccataaaaattgtatgaaagtacccttttgcttatatcctagacaacattggtatcaaaacgtttttattctgaaagacaaaaaaggaagaaaagatataaaactgtttttatttgtgtttctttttttttttaacaacagaaacataacactttcccaggggagttgtcgatacatttcccactatcctcnagactngttctctcctcgtgccgaattcctgcagcccgggggatccactagttctagagcggccgccaccgcggtgg

SEQ ID NO: 1785 - DNA, 1456 bp, Homo sapiens
  misc_feature (36)..(37): n equals a,t,g, or c
gtgatcccagcccttctatttgcttcctctccagcnnttcccccgtttcccgaggggcatccagccgtrttgcctggggaggacccacccccctattcacccttaactagcccggacagtgggagtgcccctatgatcacctgccgagtctgccaatctctcatcaacgtggaaggcargatgcatcagcatgtagtcaaatgtggtgtctgcaatgaagccaccccaatcaagaatgcacccccagggaaaaaatatgttcgatgcccctgtaactgtctccttatctgcaaagtgacatcccaacggattgcatgccctcggccctactgcaaaagaatcatcaacctggggcctgtgcatcccggacctctgagtccagaaccccaacccatgggtgtcagggttatctgtggacattgcaagaatacttttctgtggacagagttcacagaccgcactttggcacgttgtcctcactgcaggaaagtgtcatctattgggcgcagatacccacgtaagagatgtatctgctgcttcttgcttggcttgcttttggcagtcactgccactggccttgcctttggcacatggaagcatgcacggcgatatggaggcatctatgcagcctgggcatttgtcatcctgttggctgtgctgtgtttgggccgggctctttattgggcctgtatgaaggtcagccaccctgtccagaacttctcctgagcctgatgacccacagactgtgcctggcccctccctggtggggacagtgacactacgaagggagctggggtagttaaaggctcccggggcttctagaaggaagccaagcagctgccttccttttccctggggagaggtaggaaggaaccaggccctcacttaggtttggaggggcagataagagcactgctgaccatctgctttcctccaagggttgctgtgtctagggtgaagtaggcaaaacgttgcccttaaaactgggccctgaagacggttccagccttgtccttcctgtgtgctccctgagagccattcctgtcccttacacattccagggcagggtgggggtgggtagccctgggggttcccctccctcttgtgcaccattaggactttgctgctgctattgcacttcaccagaggttggctctggcctcagtaccctcagtctcctctccccacattgtgtcctgtgggggtggggtcagccgctgctctgtacagaaccacaggaactgatgtgtatataactatttaatgtgggatatgttcccctattcctgtatttcccttaattcctcctcccgaccttttttacccccccagttgcagtatttaactgggctgggtagggttgctcagtctttgggggaggttagggacttatcctgtgcttgtaaataaataaggtcatgactctaaaaaaaaaaaaaaaaaaaaaaaaaaaaaa

SEQ ID NO: 1786 - DNA, 667 bp, Homo sapiens
  misc_feature (31)..(31): n equals a,t,g, or c
  misc_feature (73)..(73): n equals a,t,g, or c
tgggttcttcaaacctccctgggaccttcanggtgaatatgccccgcccatggccttccccactgtgcttggnattcacagggcgtgagcccaccgtgcctggcctacaactacattttttaaaaaccacatttggtttaggtattataatcaaaattagaaaacaggattcaatcaaaatttccttttagcaaaattttctacaaaagacacctacacacctaagaaatatgggacccccacacatcctccgcaagtcacacaaaaggctgcagtcatagctttgcaataaaacttctgccaccatataggaaggagctaggaccagagaacaaagccatctccacagtgaatggatatactcatgtcatttgacattaaatcaactattgtttttgaagcatctcctattagtgtataagtcaaacgtcagttgatgcatagcatcagatactctgaaacaagtaaggttttgaatgcataaagtattctgggcaataaactgaactctacatggtaaagaagagtaatagaatgaaagtacctggcacctgcaattaaacctacaggcatgaattttccatagtagtaggatctcattcccataacaccaacaaaagtaacagatgtagcggctgaaaaagatacaaagaagggtcaaaaacct

SEQ ID NO: 1787 - DNA, 3332 bp, Homo sapiens
gccgcgtccgcgcgcgcgcaggattcctgcgctggaggccgcctctgacgccaccggctgggctccgccatgagttcggcgccggcctcaggctccgtgcgcgcgcgctatcttgtgtacttccagtacgtgggcaccgactttaacggggtcgcggccgtcaggggcactcagcgcgccgtcggggtccagaactacctggaggaggccgccgagcggctgaattccgtggagccggtcaggttcaccatctccagccgcacggacgccggggtccacgccctgagcaacgcggcgcacctggacgtccagcgccgctcaggccggccgcccttcccgcccgaggtcctggccgaggccctcaacacacacctgcggcacccggccatcagggtcctgcgggccttccgagtgcccagcgacttccacgctcgtcacgcagccacgtcccggacctacctgtaccgcctggccactggctgtcaccggcgtgatgagctgccggtgtttgaacgcaacctatgctggactctcccggcagactgcctggatatggtcgccatgcaggaagccgcccagcacctcctcggcacacacgacttcagcgccttccagtccgctggcagcccggtgccgagccccgtgcgaacgctgcgccgggtctccgtttccccaggccaagccagccccttggtcacccccgaggagagcaggaagctgcggttctggaacctggagtttgagagccagtctttcctgtatagacaggtacggaggatgacggctgtgctggtggccgtggggctgggggctttggcacctgcccaggtgaagacgattctggagagccaagatcccctgggcaagcaccagacacgtgtagccccagcccacggcttattcctcaagtcagtgctgtacgggaacctcggtgctgcctcctgcaccctgcaggggccacagttcgggagccacggatgaccctggacactcaagccaaagttaggccacaccaggcccaaccctgtgctggtcaagccagggcagtcacagctgcttggggcccacagcactgctgcctggtctccacagtagcctccctgcccgggtcccagcaccctggatgcccgtctctgtcccaggcgggatggggcacagtgcaggacacagccatgtacaccaagaagagagtaccaagtagtcttttgttcagcttttactggaaactgctgtctaggaccacctgccctaaccaggaataaaggcaagacagcctggagaccagtttgtttcttcagctgcaaacagctgcctgggcaggcaggtgacacaaggcctctgtccccagggatgggacctgcagggtctgttcacccagggcacccacagtcctgaagtgcaggcccagggtctgtccagctgggagagggcagaggtggcggctgggtgagttgccggcctcagctgggggcctgggggaggcccttcttcagcagagatgtgaggaagctccccagctcctcgtcctggtaggtccaggagaccagcagcaccttggtgcctgggtcctcagaaggggcggcggcctggaggaggacggactccacagtcacagagccgtccgggaggtgctgcacacagtggtccttcaggacgctcttgaggtggctgtagacgcgcaatgccgtctcctgctccttgcgtgtgtcatgcaggtgcacgcggcaggtgaagcgcagctggtgctcagccagacccagctctttgagggcttgctctgaggacaccagccggaagttgctgtccttcatgatcagggtgccgtgcaggagccgaggcttcttggcctcagggagcagcccctgcgccatctcccgcttcagcagccccagcgagatgcctacggggatgctggggcttgtgggcagcgtcaccgtctcgccattggccggcatgtagcagttgacccggagctcctgctcgatcttctgcttcaggaactccatcttcttggcctcgccatgcaccagcagcacgctctccggctctgcctggcccaccagctgcatgatgcccttggcgtccgcgtgtgcgctgaatgacatgtactccacctgcatcttgacctccagcacctgccgcccctccatctcgagcttccgctgcccgctgaggatcttgtggccgacggtgccctgcacgcagtagccgggcatgatgaccatgttcttttcgtttccggcccatttccggaagatctgcagggactgcccagcgtgcagcattcctggcgtggcaaacacaaccatcggtcctgggttgtcagcaaaagcccggtcgaaggccttgatgtgcttgaactcaaacatgttcctctgcacaaaagtcttgcggatcttctggttggtccaggggatgaacagcttgtagtagtggttggccttctcggtcagccccgtggagaagtagatgggcaccttcaggttcatgcgctcccagaaggtctccaggaggatgcagagctcctgggcgcggcccagcgcgaacacaggtatcagcaccttcccaccacgctccacggtctcgtggactttcttcaggaagtctcgctcccggcagcgcttggagtcacggatggtcgtggcgtacgtggactctgtgatgagcaggttggggcggcacttgtcaatccaggcagctcctaagtgtcggtctggggtcatgttataatcacccgtgtagaccacagactctgagcccactttaatctggaacatggctgcccccagcacgtggcctgcatagtaggccttgatctccagctcatcatctacctggaccgtctggtggaggtggacagccaccaccttcttcatgcagtctttgatcatctgggaggtgaagaagttggcctcgcccttcttgtctacggcgatcttgcggtagtcctccagcaagatggggcagatggcctgggtggggtgagtcatgtagatggggccgtcgtagcccaccatctcgctgaagtaggggagtgccccgcagtggtccaggtggaagtggctaatgatcacacagtccaggaagtctgttaggcggccgttctgggtgatgtaggagaagtcagggaagcgtcggtcgtcattgaagcccatgtgcattccacagtccagcatgacattcttgcccgcaatggagaccaggatgcagcttcggcccacgtcctggccggcccccaagggcgtgactctgatctcaggcatcgtctccgccgcgctcccggacccgcgaggcccgcctgcggctcgagactagttctctctctctctctc

SEQ ID NO: 1788 - DNA, 1900 bp, Homo sapiens
  misc_feature (1123)..(1123): n equals a,t,g, or c
  misc_feature (1893)..(1893): n equals a,t,g, or c
gacgggcccccaccgccgcccgccgggaggaccgagcctaagagggcagccgcctgaaggaacgcgacggcggcgcccgcaggttgccctcggagtggagtctgtggctttccaccggagcagcgcccaggaagtgttttcgtgtgatgaaagttatttttcagtgctgtacaagcgtcttgaattactctggtagcttttccagaaagacccatgacttcaccacatttctcgagttacgatgaaggtcctctggatgtcagcatggcagccacaaacctggagaaccagctgcacagcgcacagaagaacctcctgttccttcagcgggagcatgccagcacgctcaaggggctgcactccgagatcaggcggctgcagcagcactgcacagatttaacatatgagctgacagtcaaaagttcggaacagacaggagacgggacttctaaaagcagtgaattaaagaaaagatgtgaagagctggaagcccaactgaaagtgaaagagaacgaaaatgctgagttgttgaaagaactggagcagaaaaaygcgatgatcacagtgctggagaacaccatcaaggagcgagagaagaagtacctggaggagctgaaggccaagagtcacaagctgaccctgctgtctagcgagctggagcagcgggccagcaccatcgcctacctgacctcccagctgcacgccgccaagaagaagctcatgagctccagcgggacctcagatgccagcccgtcagggagccccgtgctggccagctacaagccagcgccccccaaagacaagctacccgaaacgcctcgccgccgcatgaaaaagagcctctcagcccccttgcacccggaatttgaagaggtctacagattcggggcagagagcaggaaactccttttgcgggaaccagtggatgctatgcccgaccccaccccatttctgctggctagggagtccgccgaggtccacctcatcaaagagaggcccctcgtcatcccccccatcgcctccgaccgaagcggcgagcagcacagcccggcccgcgaaaagccgcacaaggcccacgtcggggtggcacatcggatccaccacgccaccccgccgcaggccnagcccgaggtgaagaccctggcggtcgaccaggtgaacggaggcaaggtggtgaggaagcactcagggacggacagaactgtgtgaagcccgccgtgccccaccccgcgctgtccatgcactgtgagcaccactgggaaatctcagccacaccttttctgtttaatcccatgcatgccaaacacttttcacacctaccgacccattctccttctgcttctcttgccctcttcttcacaccaaaatatgatcgtgtccctgccgcagaatatgtatttcctaattgctgtggccaaacgcctgtgtgccgaatcgcttgcttctgatcccgctccgtgtaacctaagtgcgctgcaggcaaagcccaggccacggctgcgtcactactgatgttcacgatgccacacagtcacacacctaattcattctcaagtcggagcaacacataccaaccttgaccttatcctcaagctccagggcagcctggccgagcagcccctgctccctcctggagacccttgtcacctcccgagctcctcctggagacccctgtcacctcctgaccaacctttcccagggcggcaccgatcaccgagcagccgtgcgtgtatctcaaggaactaaataagatgacgctactcctcatagcaccacaacctgaatgtgtgttcatatttttttgttagttttatccaaaatgtttaagatcccaacaaactttattttctaaacctgcaaaaaaaaaaaaaaaaaaaaaaaaaaaaagggggnccccttt

SEQ ID NO: 1789 - DNA, 2641 bp, Homo sapiens
  misc_feature (2630)..(2630): n equals a,t,g, or c
gagccagcaccacctcccttcagaggacgcatgkacttttggactttccagaggtggttctktgtttctgcccttggctcctctccgtcttgggctggggcacttggagccctctccatgtggcgcccagtgttggggggaggcaggctccagtggaggctgagtgaggcctggtcccttccccgtgccctcctcggagctgccacagaggctaagacggctgtcctgctggtgctggccctgctggatgtggtattgaagtctggggcagctgatagcaggaaggagacccccttggatgctggtctcctgggacctgaacagtctgtcagcaatggctggaaatccttcttcctctggccaccccgggggtgccgggcaacccccttagctctaagatgtggccacaaatctcttcccactcctccccgccracctgaacagaaagttttgaccttgcaacctgtaagaaagaatccgtccgcatgactgtttacaagcgatagaaacacgtaagactctgtccccttgagctcccacccccgggccggggatgccccacctggggtgactgcactgtagctgcaaggcgtgttcttgcacgaagtktgatcttatggccctgcgagaggtgctcatcatcatgcccattttctgctgtttctgatgggtcagctacctcacggcggggccagctctgctgtcctggcaagtgtcattgactctctaaacttgaagtccttcaggagccctgagcccaacatccatgagacaccccgagttgtgcttcatgagagttggattctctgcccactctttcagggatgtccaaggtccatgttagggggcaggcccccagctccactcactgcacaagcaccctaaatgttggaagcacaaaatggttgtgatttgagcacaatggcagggtcccgcaggcagacttgacaggcccaggcccgggaggatccccccacgttggctctgtccaaagtgagattgggggtgcctgtgtctgggacagggggctgcccttgctcagaccaggccttggctcatggcttgtcctaattctgggactcgtcatcttacttcttgcccttctgtgcccatcttaagactggaggctgagccttgtcaggcccagccacatctttacgccatgggaccaggagtaaagcgctctctaaaccccgcaccccaaatctctaaacgcctgagttcaggctgagtcctagccctagtgagcctgaagagcttggactgattcccagtctcctgggtcaagccccactttgtgctttcgaagcttatgagcgggttccctggatagaaggagtcttccatccccactgcccttgggcctcttcagcatagtcctgtgccagggccctgtcctcactatcagtcagttcagtatttgctttcacgtgagtggcggactcttctgaagcagccagaactctcaaagrcagcgcatggagttgccttgcgagatttccaaggaaggaggaaagattaacaggcggagcctggcacacccaagcctttgaggtggtcagagtgccaccttcagccccttgggaagggacagcggtgggtctgggagtggcctcaccctggattcagcctaggaatctcttcaccctcagctgtccagccctgctgcctgtctggggatgtgtggcctgggcagagggcagtttaaagcacaaaaccacatggggaaaacacaaggttgcggggactttctcatgtgcctgatgtggtggagggagacaccagcaggtggctgcagtgacgttagggaacataacacttctttgccctgctagctctcagctctggggggcatcccccgatgtggtctgggctgggagcaggcatatcccctggttgttgcctgtgcctggtctgttcaccatcgtgtttgtgtgggcagagcctgccctgcaggagcagtgactttcttcccactgtgtgtcccggacctgtggtatgtgtccctttgccatcccaaacaggcaactgcttgctgctctccttgcttggcatagcctcctggtcagtggccaatgccccacaggccttcctgggcctggccctcctctcctgactcccagatccttccctgccctcttgtgtgcaaggacagattttgcagggaaagttctgtttcttctttgatacctttgttctgtcccctgccccatccccagcactcatgatcttgaagcccctatcacactctagttcagtcctgtgaaccatgtcctgagggccttgcagggaagtaggaaatagaaactcctccacaaagagccgaggatcagagaagacccctgagatgaatcagggccctgccctgcccaccaactcttttctagcaatcatgtcctgcccaggctgcaggcttcattaggctcctgctgtcctccatgatgtgactagcacaaggtgtatatatgttttgtacctctgccgatggctgtacatagtgtatgaaagttatttaagccccatgttgtacatttctgttcctagattggatgtgtgtgttctaagaagttgtcataaataaaacctgaatgaccaaaaaaaaaaaaaaaaaaaaaaaattactcggtcgncaagggaattc

SEQ ID NO: 1790 - DNA, 712 bp, Homo sapiens
  misc_feature (633)..(633): n equals a,t,g, or c
  misc_feature (673)..(673): n equals a,t,g, or c
  misc_feature (675)..(675): n equals a,t,g, or c
  misc_feature (690)..(690): n equals a,t,g, or c
  misc_feature (702)..(702): n equals a,t,g, or c
agcttccgggactatgtgctmygtcaggccaatgtgaccatcgggctgcccaccaagcagcccatccctgactgtgagatcaagaatcgcccgagccttctggtggagaagatcaacctgtttgccatgtttggaactggcatcgccatgagcacctgggtctggaccaaggccacgctgctcatctggaggcgtacctggtgcaggttgactgggcagagtgacgatgagccaaagcggatcaagaagagcaagatgattgccgacagggagcgtggaccctggtctccaacccattctgcccagagcccagtccccctcaggatccatttctgcccagtgcaccggcccccgtggcatgggctcatggccgcgacagggcctggggcctattcactcccgcaccaacctgatggacacagaactcatggatgcagactcggacttctgagcctgcagagcaggacctgggacaggaaagagaggaaccaataccttcaaggctcttcttcctaccgagcatgcttccctaggatcccgtcttcagagaacctgtgggctgactgcccttcgaagagagttctggatgtctggctcaaagcagcaggactgtgggaaagagcctaacatctncatggggaggcttaccccagggacagggccttggaagctnanggtccttggttctgnctgccaggttgnaacctgggtt

SEQ ID NO: 1791 - DNA, 965 bp, Homo sapiens
  misc_feature (18)..(18): n equals a,t,g, or c
  misc_feature (25)..(26): n equals a,t,g, or c
  misc_feature (32)..(32): n equals a,t,g, or c
  misc_feature (948)..(948): n equals a,t,g, or c
  misc_feature (963)..(963): n equals a,t,g, or c
ttcttctaacactcttanaaataannttattngaaaagcttaaaagaattaagccaaactgtctmtattctcagaagatatgatcatctatgtagaaaatcttaaagaatctacgaaaaactactagaactgaagtagggagtttagcaaggttgaagaatacccaatcagtatacaaaattgattgcatattcatatattaggaacaaacaactggaaattgaaatttaaaaaccaatatcatttataaccacatcaaaaacaatgatatacttaaatttagccaagaatgtataagacttgcacactgaaaacagtaagacattggtgaaaaaaaactaaagaagacctaagaagatgaaattatacatatgtgtgttggaagactcaatatttttaagatgataattcttcccaaattaacktatagattcaatgaatcctaatcaaaaatacttgcaggattttttacagaagttgacaagcagattctaaaattcatatggaaaggcaaaggatctaatctagccaaaaatttttgaagaagtttaaaattggaaatctcacactatctgatttcaaggcttataatataatgctacagtagtcatgatagtgtcatattgtgtatgaagagatatatcaatctatggaacacaaaagaaagttcagaaatagccccacacacactgcctgtagtcccagctactcaggaggctgaggcaggagaattgcttgaacccgggaggcagaggttgcagtgagccaagatcatgccactgcactccagatcatgccactgcactccagcctggtgacagcgcaagactctgtctcaaaaaaaaaaaaaaaaaaaaaagccccacataaatatggccaatcrattctttrcaaaaatgtcaaggtaattcatgagagaaaragtcctktcaacatggatgaactatnatagagatttcgctnaa

SEQ ID NO: 1792 - DNA, 319 bp, Homo sapiens
attctgttacctttatttatttcactggctagaacttccagtaatacgttgaataaaggtagataaagcagatatttgtgctttagtcctaatcttaggaaaaaaggcattaggtcatttacatgtatgatgtaaatgttatgatgtaaaatgtattttaactgtgatgttaactgtgaattatcttagatgctatatcaggttgaaaattcccttctattctttgttgttgagagatttttataataaatagatattgaattttgtcaaaaaaaaaaaaaaaaaaaaaaaaaaaaaaaaaaaaaaaaagggcggccgc

SEQ ID NO: 1793 - DNA, 555 bp, Homo sapiens
  misc_feature (513)..(513): n equals a,t,g, or c
gcccacgcgtccgcatttttatatatcttatttggggaaacatctattaaaacccatcacccaaatttttatcaggttgtttgtcttcttattgaattctaagagttctcttatatattctgaatagaaattctttatggaatatacatttagcmaatgttttctttcagtaattgcagtggcttgcgttttcatttttttttttaacagtggctttgcctatcccaaggcaacaaagattttctcattcatttttttctagaggcatcatacttttagttttacatttatgtctatgacccaatccaaattaatttgtgtatgatgtgaggccaggtgaaagtcattttgcatagtgtatcaaccattatagcacattttgttgaaaggacttttctctcatgaattacctgacattttgcaaagaatcgatggscatattagtggggctttttttttttttttttgagacagagctgcgcgtcaccagcggaggcagtgcagacggaggcntgcagactggccacgcactcgctccggtcagcatcccgctca

SEQ ID NO: 1794 - DNA, 1013 bp, Homo sapiens
gttaagacacgcgtcccaggtgtggatgtgtgggtgcttaagacagcagactgctgctttgctgggccaggcctgggtttatttattacaagcagttcaggaagcacagacatcacgttgttcacttgcttcactgatgaatgtaataattgttctcgttcatgccctttgcccctggtgtcggggctgtccacactggggaccattggtgcccccatgattattagctccctgaagcctggtgggtcgtcagggcttctgtccggtgtttaaagacccatcccagacaagcccaaaccacctcagtttgaagagacatagagggacaggcagacggggcctcagagggatccagcctcatccagcctcccggcaacctcaggagagcaggccagatggggcctcagagggatccagcctcatccagcctcccggcaacctcaggctggttcccttccagtgccgactccacagccctgctggttcccttccagtgccgactcccaggctgagtcgctttgcakcgtttgggacgtacgcagggcctgtgctgtgggccagccacttagtgcacttcctgagctcagaaacacgcagtggttcagcactgagtcatgcttgcttctgctacgcactgatttgttctattccagttttcacgtacatcgttttggtgacatctctgcgttatcatttatttatatggagtgtattttctccaaaacttctctacgagggaatgcacctgctcattacagctgctgtctgtgtattcttcacggcaatggatcaaaccagactcacacagtcttagactaagctgaacactggaaaaataatacatgcttaaagtctgctgttattctaaaatgaaagatatgaattcaacaaagttgatggataactttctttgactgctctacctgaatttagactaagcagtaaatagtttaataaaagatcactttaatataaaaaaaaaccgagggcggccgctcctagaggatccaagc

SEQ ID NO: 1795 - DNA, 702 bp, Homo sapiens
  misc_feature (603)..(603): n equals a,t,g, or c
  misc_feature (652)..(652): n equals a,t,g, or c
  misc_feature (676)..(676): n equals a,t,g, or c
  misc_feature (684)..(684): n equals a,t,g, or c
ggctacttctgtggcctctcgtggctggcggcaggtggggtgatggtgctggcctcggcgctgctgtgtgtgattgtgtctgttctgaccaacgtgctcgtgggtggaaacaccccaaggaagaaccccatgcatcccagctcaaggtggtcagagctagaccttcttattctgttggggacggcgggccacgtcttgagcctgggcgccacagcttcgtggaggaggagcaccagacctggtacttccttgtgaacaccctgtgtctagctctgagccaagaaacctacagaaactactttctgggagatgacggtgagcctccgtgtggcctctgtgtggaacaagggcatgacggggccacagcagcgtggcaggacgggcctggctgtgatgtcctggagcgagacaaaggccacggaagcccctctacctccgaagtgctcagaggccgcgagaagtggatggtgctggccagtccgtggctaatactggcctgctgccggctgctgcgctccctaaaccagacagtgtgcagtgggctcaccggcctgactcggccactggctcaccagctctgaccacaaagccgarctctctgtnctggctgcctctycctctcgtatttttgtgctggtgcaaaggggttctncctgtgtycaaagctgccctgcgntggggctnctggggcgtctaatgcta

SEQ ID NO: 1796 - DNA, 1070 bp, Homo sapiens
  misc_feature (985)..(985): n equals a,t,g, or c
  misc_feature (1064)..(1065): n equals a,t,g, or c
gtgcagcagggggtgctcccctgtgtccaaggctgccctggcgctggggctgctgggcgtctactgctaccgggcggccatcgggagtgtccggttcccgtggcggmcggacagcaaggacatttccaagggtattattgaagctcgttttgtttatgtctttgtccttggcattctgttcacgggcaccaaagacttacttaaatctcaagtcattgctgcagacttcaaactcaagactgtaggtttatgggagatatatagtggattagttcttctggcagccttgctctttagaccacataatcttccggtcttagcatttagcctcttgattcagactctaatgactaaattcatctggaagcccctgagacacgatgcagctgagattactgtgatgcattattggtttggtcaagcattcttctattttcagggcaactccaacaacattgccaccgtggacatctccgcaggcttcgtgggcttagacacctacgtggaaatcccagccgtgctcctgacagcgtttgggacgtacgcagggcctgtgctgtgggccagccacttagtgcacttcctgagctcagaaacacgcagtggttcagcactgagtcatgcttgcttctgctacgcactgatttgktctattccagttttcacgtacatcgktttggtgacatctctgcgktatcatttatttatatggagtgkattttctccmaaacttctctacgagggaatgcacctgctcattacagctgctgtctgkgkattcttcacggcaatggatcaaaccagactcacacagtcttagactaagctgaacactggaaaaataatacatgcttaaagtctgctgttattctaaaatgaaagatatgaattcaacaaagttgatggataactttctttgactgctctacctgaatttagactaagcagtaaataggtttaataaaagatcactttaatatacagnttgtatcatattttcccccattgacaatcactctagaagcttctgaacttttaatttcctcttgaataagctatggggnngaccc

SEQ ID NO: 1797 - DNA, 500 bp, Homo sapiens
cacgcctagaagacagcggaactaagaaaagaagaggcckgtggasgaagaatttcagaacatttccccagaggagctcaaaatggagttgccggagagacagcccaggttcgtggtttacagctacaagtacgtgcatgacgatggccgagtgtcctaccctttgtgtttcatcttctccagccctgtgggctgcaagccggaacaacagatgatgtatgcagggagtaaaaacaggctggtgcagacagcagagctcacaaaggtgttcgaaatccgcaccactgatgacctcactgaggcctggctccaagaaaagttgtctttctttcgttgatctctgggctggggactgaattcctgatgtctgagtcctcaaggtgactggggacttggaacccctaggacctgaacaaccaagactttaaataaattttaaaatgcaaaaactcggaaaaaaaaaaaaaaaaaaaaaaaaaaaaaaaaaaaaaggggggagg

SEQ ID NO: 1798 - DNA, 2309 bp, Homo sapiens; identical to SEQ ID NO: 420
  misc_feature (2304)..(2304): n equals a,t,g, or c

SEQ ID NO: 1799 - DNA, 1007 bp, Homo sapiens
  misc_feature (10)..(10): n equals a,t,g, or c
  misc_feature (14)..(14): n equals a,t,g, or c
ggtaattccnccangtacccgtccggaattcccgggtcgacccacgcgtccgcttyttwtktattttcaagattattctgtgcactttaaatttacttaacttaccataaatgcagtgtgacttttcccacacactggattgtgaggctcttaacttcttaaaagtataatggcatcttgtgaatcctataagcagtctttatgtctcttaacattcacacctactttttaaaaacaaatattattactatttttattattgtttgtcctttataaattttcttaaagattaagaaaatttaagaccccattgagttactgtaatgcaattcaactttgagttatcttttaaatatgtcttgtatagttcatattcatggctgaaacttgaccacactattgctgattgtatggttttcacctggacaccgtgtagaatgcttgattacttgtactcttcttatgctaatatgctctgggctggagaaatgaaatcctcaagccatcaggatttgctatttaagtggcttgacaactgggccaccaaagaacttgaacttcaccttttaggatttgagctgttctggaacacattgctgcactttggaaagtcaaaatcaagtgccagtggcgccctttccatagagaatttgcccagctttgctttaaaagatgtcttgttttttatatacacataatcaataggtccaatctgctctcaaggccttggtcctggtgggattccttcaccaattactttaattaaaaatggctgcaactgtaagaacccttgtctgatatatttgcaactatgctcccatttacaaatgtaccttctaatgctcagttgccaggttccaatgcaaaggtggcgtggactccctttgtgtgggtggggtttgtgggtagtggtgaaggaccgatatcagaaaaatgccttcaagtgtactaatttattaataaacattaggtgtttgttaaaaaaaaaaaaaaaaaaaaaaaaaaaa

SEQ ID NO: 1800 - DNA, 1001 bp, Homo sapiens
tcgagttttttttttttttttttagcacgtcatgccactctctcctaaaccaataaagtttccactgaaacatctgcagccagacatattggtgctccattgcatgtaatttgtttcttttctcttgctatttttagaatcctttcttttcccttgacctttgggagtttgattattagataccttaaggcagtgctatggtttggatctgtgctcccattcaaaatctctctcaaatggtaatattcataatctccacatatgaagggtgaaccagatggaggcaattggatcatgggggtagtttccctcatgctgttctcatgatagtgagtgacttctcatgagawatgatgattttataagcatctgggcattttccctacttgcactagctctgtcctgccaccctgtgaagaaggtgtctgcttcttcttgccttctgccakgatgtaagtttcctgagatctccctggtagtgcagagawgtgagtgaatkgcacatctttccttaataaattacccaggctgggkatttcttcatagtaatgkgaaaagkgactaatatggkaaawtggkactgcagagggtggggtscgctataaratactcaaaaatgtggaagcaactttggaactgggtaayaggcagaggttggaacagtttggagggctcagaaaaaaatagaaagacgtgggaaagtttggaacttcttagtgacttgttgaatgattttgaccaaaatgctgatagtgatatggacaataaagtccaggctgaggtgatctcagatggagatgaggaacttgttgggaactaaaataaaggtaattcttgctatgcttaacaaagagactagcagcatttttgtctctgccccagagatctgtggaactttgaacttgagagagatgttttaggatgtcttgcagaagaaatttctaagcagcaaagcattcaaaaggtgattgagtgctcttaagagtactcgtgccgaattc

SEQ ID NO: 1801 - DNA, 2458 bp, Homo sapiens; identical to SEQ ID NO: 422

SEQ ID NO: 1802 - DNA, 555 bp, Homo sapiens
  misc_feature (6)..(6): n equals a,t,g, or c
caggcngagccacccaggccagccatttcctcttcctaagaagagcaacctcagccggagtgagttttttctgactttgcagctgagtctggagaaaagtggcatgccagagcgggtcggtgggaaacagggtgaactttagcttccatcaacagctctggtagcaaaaccagtcccctaccccctagagaatgcatccgtttccccacctgatatggtttggctgtgtccccacctaaaactcatcttgaattgtagctcccataattgccatgtgttgtgggaaggacccagtgggagataattgaaatatgggggcagtttccgccatactgttctggtgatagtgaatagatctcatgagagctgatgattttataagaggtttccccttttgcttagttctcattctctcttgcctgccgccatgtaagacgtgcctttctgtcatgcttgtgaggcctccccagccacgtggagctgtgagttcattaaacctctttttctttataaattaaaaaaaaaaaaaaaaaaaaaaaaaaaaaaaaaaaaagc

SEQ ID NO: 1803 - DNA, 603 bp, Homo sapiens
  misc_feature (541)..(541): n equals a,t,g, or c
aggcatgcaagcttcagggttgagatgtgtataagagacacgggatataccattctgatgtctggaggacggtggccttcttctgacagctctactaggcagtgtcccagtggggtctctgtgtgggggcttccccttccacattgccttaacagaggttctccatgagggcctcactcctgtagcaaacttctgcctggacatacatgcatttccatacattctctgaaatctaggcagaggttcccaaacctcagttcttgacttctgtgcacctgcaggctcaacactacgtggaagatgccaagacttggggcttgcaccctctgaagccaaggcctgagctgtatcttggccccttttagccatgactagagcagctgggatgcatggtaccaagtccctgggctgcacacagcaaggggaccttgggcctggcccacaaaaccattttttccctcctaggcctccaggcctgtgatgggaggcactgctgcaaaggtctctgacatgccctgcagacattttcccctgkcttasngattaacatttggctccttggtacttatgcaaawttctgcagggggcttgaatttatcctca

SEQ ID NO: 1804 - DNA, 597 bp, Homo sapiens
tgcaggcatgcaagcttcagggttgagatgtgtataagagacagggcctgagctgtatcttggccccttttagccatgactagagcagctgggatgcatggtaccaagtccctgggctgcacacagcaaggggaccttgggcctggcccacaaaaccattttttccctcctaggcctccaggcctgtgatgggaggcactgctgcaaaggtctctgacatgccctgcagacattttccccatgtcttagtgattaacatttggctccttgttacttatgcaaatttctgcagggggcttgaatttatcctcagaaaatgggtttttcttttctatctcatcatcaggctgcaaattttccaaacttttatagtctgtttcccttttaaaactgaatgcttttaacagcacccaagtcacctcatgaatgctttgctgcttagaaatttcttctgccagataccctaaatcatctccctcgagttcaaagttccacaaatctctagggcaggggcaaaatgcagccagtctctttgctaaaatatagcaagagtcacctttactccagtacctgtctcttatacacatctcaaccctg

SEQ ID NO: 1805 - DNA, 784 bp, Homo sapiens
gagtcgacctgcaggcatgcaagcttcagggttgagatgtgtataagagacaggtgtgggggcttccccttccacattgccttaacagaggttctccatgagggcctcactcctgtagcaaacttctgcctggacatacatgcatttccatacattctctgaaatctaggcagaggttcccaaacctcagttcttgacttctgtgcacctgcaggctcaacactacgtggaagatgccaagacttggggcttgcaccctctgaagccaaggcctgagctgtatcttggccccttttagccatgactagagcagctgggatgcatggtaccaagtccctgggctgcacacagcaaggggaccttgggcctggcccacaaaaccattttttccctcctaggcctccaggcctgtgatgggaggcactgctgcaaaggtctctgacatgccctgcagacattttccccatgtcttagtgattaacatttggctccttgttacttatgcaaatttctgcagggggcttgaatttatcctcagaaaatgggtttttcttttctatctcatcatcaggctgcaaattttccaaacttttatagtctgtttcccttttaaaactgaatgcttttaacagcacccaagtcacctcatgaatgctttgctgcttagaaatttcttctgccagataccctaaatcatctccctcgagttcaaagttccacaaatctctagggcctgtctcttatacacatctcaaccctgaagcttgcatgcctgcaggtcgag

SEQ ID NO: 1806 - DNA, 687 bp, Homo sapiens
  misc_feature (618)..(618): n equals a,t,g, or c
  misc_feature (642)..(642): n equals a,t,g, or c
  misc_feature (654)..(654): n equals a,t,g, or c
  misc_feature (684)..(685): n equals a,t,g, or c
caggcatgcaagcttcagggttgagatgtgtataagagacaggaagatgccaagacttggggcttgcaccctctgaagccaaggcctgagctgtatcttggccccttttagccatgactagagcagctgggatgcatggtaccaagtccctgggctgcacacagcaaggggaccttgggcctggcccacaaaaccattttttccctcctaggcctccaggcctgtgatgggaggcactgctgcaaaggtctctgacatgccctgcagacattttccccatgtcttagtgattaacatttggctccttgttacttatgcaaatttctgcagggggcttgaatttatcctcagaaaatgggtttttcttttctatctcatcatcaggctgcaaattttccaaacttttatagtctgtttcccttttaaaactgaatgcttttaacagcacccaagtcacctcatgaatgctttgctgcttagaaatttcttctgccagataccctaaatcatctccctcgagttcaaagttccacaaatctctagggcaagggcaaaatgcagccagtctctttgctaaaatatagcaagaagtcacctttactccagtaccaaacaagntcctcatcgctatcttgagaccanctcagcctgganttcagggcccaaacattatcagcatttggnnaa

SEQ ID NO: 1807 - DNA, 980 bp, Homo sapiens
acgagcgccatactgttctggtgatagtgaatagatctcatgagagctgatgattttataagaggtttccccttttgcttagttctcattctctcttgcctgccgccatgtaagacgtgcctttctgtcatgcttgtgaggcctccccagccacgtggagctgtgagttcattaaacctctttttctttataaattacccagtcttggttatgtctttatcagcactgtgaaaatgaacctatacagtaaattggtaccagtagagtggggcgctgctgtaaatacccaaaaatgtggaagcaactttggaactgggtaacaggcagaggttggaacagtttggagggatcagaagacaggaaaatgtgggaaagtttgggacttcctagagacttgttaaatggctttgaccaaaatgctgataatgattgggacatgaaatccaggctgagttggtctcagatagcgatgaggaacttgtttggtactggagtaaaggtgactcttgctatattttagcaaagagactggctgcattttgcccctgccctagagatttgtggaactttgaactcgagggagatgatttagggtatctggcagaagaaatttctaagcagcaaagcattcatgaggtgacttgggtgctgttaaaagcattcagttttaaaagggaaacagactataaaagtttggaaaatttgcagcctgatgatgagatagaaaagaaaaacccattttctgaggataaattcaagccccctgcagaaatttgcataagtaacaaggagccaaatgttaatcactaagacatggggaaaatgtctgcagggcatgtcagagacctttgcagcagtgcctcccatcacaggcctggaggcctaggagggaaaaaatggttttgtgggccaggcccaaggtccccttgctgtgtgcagcctgtctcttatacacatctcaaccctgaagcttgcatgcc

SEQ ID NO: 1808 - DNA, 1893 bp, Homo sapiens
cacgcgtccgtgaacataaaggagaaaactcggctgcgggcacctcccaacgccaccttggaacatttctacctgaccagtggcaagcagcccaagcaggtggaagtagagcgttggttccgtcgccgccgcaaccaggaccggcccagtctcctcaagaagttccgagaagccagctggagattcacattttacctgattgccttcattgccggcatggccgtcattgtggataaaccctggttctatgacatgaagaaagtttgggagggatatcccatacagagcactatcccttcccagtattggtactacatgattgaactttccttctactggtccctgctcttcagcattgcctctgatgtcaagcgaaaggatttcaaggaacagatcatccaccatgtggccaccatcattctcatcagcttttcctggtttgccaattacatccgagctgggactctaatcatggctctgcatgactcttccgattacctgctggagtcagccaagatgtttaactacgcgggatggaagaacacctgcaacaacatcttcatcgtcttcgccattgtttttatcatcacccgactggtcatcctgcccttctggatcctgcattgcaccctggtgtacccactggagctctatcctgccttctttggctattacttcttcaattccatgatgggagttctacagctgctgcatatcttctgggcctacctcattttgcgcatggcccacaagttcataactggaaagctggtagaagatgaacgcagtgaccgggaagaaacagagagctcagagggggaggaggctgcagctgggggaggagcaaagagccggcccctagccaatggccaccccatcctcaataacaaccatcgtaagaatgactgaaccattattccagctgcctcccagattaatgcataaagccaaggaactacccygctccctgcgctatagggtcactttaagctctggggaaaaaggagaaagtgagaggagagttctctgcatcctccctccttgcttgtcacccagttgcctttaaaccaaattctaaccagcctatccccaggtagggggacgttggttatattctgttagagggggacggtcgtattttcctccctacccgccaagtcatcctttctactgcttttgaggccctccctcagctctctgtgggtaggggttacaattcacattccttattctgagaatttggccccagctgtttgcctttgactccctgacctccagagccagggttgtgccttattgtcccatctgtgggcctcattctgccaaagctggaccaaggctaacctttctaagctccctaacttgggccagaaaccaaagctgagcttttaactttctccctctatgacacaaatgaattgagggtaggaggagggtgcacataacccttaccctacctctgccaaaaagtgggggctgtactggggactgctcggatgatctttcttagtgctacttctttcagctgtccctgtagcgacaggtctaagatctgactgcctcctcctttctctggcctcttcccccttccctcttctcttcagctaggctagctggtttggagtagaatggcaactaattctaatttttatttattaaatatttggggttttggttttaaagccagaattacggctagcacctagcatttcagcagagggaccattttagaccaaaatgtactgttaatgggtttttttttaaaattaaaagattaaataaaaaatattaaataaaacatggcaataagtgtcagactattaggaattgagaagggggatcaactaaataaacgaagagagtctttcttawrmaaaaaaaaaaaaaaaaaaa

SEQ ID NO: 1809 - DNA, 1315 bp, Homo sapiens
ggcacgagctggagtcagccaagatgtttaactacgcgggatggaagaacacctgcaacaacatcttcatcgtcttcgccattgtttttatcatcacccgactggtcatcctgcccttctggatcctgcattgcaccctggtgtacccactggagctctatcctgccttctttggctattacttcttcaattccatgatgggagttctacagctgctgcatatcttctgggcctacctcattttgcgcatggcccacaagttcataactggaaagctggtagaagatgaacgcagtaccgggaagaaacagagagctcagagggggaggaggctgcagctgggggaggagcaaagagccggcccctagccaatggccaccccatcctcaataacaaccatcgtaagaatgactgaaccattattccagctgcctcccagattaatgcataaagccaaggaactaccccgctccctgcgctatagggtcactttaagctctggggaaaaaggagaaagtgagaggagagttctctgcatcctccctccttgcttgtcaccagttgctttaaacaaattctaaccagcctatccccaggtagggggacgttggttatattctgttagagggggacggtcgtattttcctccctacccgccaagtcatcctttctactgcttttgaggccctccctcagctctctgtgggtaggggttacaattcacattccttattctgagaatttggccccagctgtttgcctttgactccctgacctccagagccagggttgtgccttattgtcccatctgtgggcctcattctgccaaagctggaccaaggctaacctttctaagctccctaacttgggccagaaaccaaagctgagcttttaactttctccctctatgacacaaatgaattgagggtaggaggagggtgcacataacccttaccctacctctgccaaaaagtgggggctgtactggggactgctcggatgatctttcttagtgctacttctttcagctgtccctgtagcgacaggtctaagatctgactgcctcctcctttctctggcctcttcccccttccctcttctcttcagctaggctagctggtttggagtagaatggcaactaattctaatttttatttattaaatatttggggttttggttttaaagccagaattacggctagcacctagcatttcagcagagggaccattttagaccaaaatgtactgttaatgggtttttttttaaaattaaaagattaaataaaaaatattaaataaaaaaaaaaaaaaaaaa

SEQ ID NO: 1810 - DNA, 1315 bp, Homo sapiens; identical to SEQ ID NO: 1809

SEQ ID NO: 1811 - DNA, 1311 bp, Homo sapiens
ggcacgagctggagtcagccaagatgtttaactacgcgggatggaagaacacctgcaacaacatcttcatcgtcttcgccattgtttttatcatcacccgactggtcatcctgcccttctggatcctgcattgcaccctggtgtacccactggagctctatcctgccttctttggctattacttcttcaattccatgatgggagttctacagctgctgcatatcttctgggcctacctcattttgcgcatggcccacaagttcataactggaaagctggtagaagatgaacgcagtaccgggaagaaacagagagctcagagggggaggaggctgcagctgggggaggagcaaagagccggcccctagccaatggccaccccatcctcaataacaaccatcgtaagaatgactgaaccattattccagctgcctcccagattaatgcataaagccaaggaactaccccgctccctgcgctatagggtcactttaagctctggggaaaaaggagaaagtgagaggagagttctctgcatcctccctccttgcttgtcaccagttgcctttaaaccaaattctaaccagcctatccccaggtagggggacgttggttatattctgttagagggggacggtcgtattttcctccctacccgccaagtcatcctttctactgcttttgaggccctccctcagctctctgtgggtaggggttacaattcacattccttattctgagaatttggccccagctgtttgcctttgactccctgacctccagagccagggttgtgccttattgtcccatctgtgggcctcattctgccaaagctggaccaaggctaacctttctaagctccctaacttgggccagaaaccaaagctgagcttttaactttctccctctatgacacaaatgaattgagggtaggaggagggtgcacataacccttaccctacctctgccaaaaagtgggggctgtactggggactgctcggatgatctttcttagtgctacttctttcagctgtccctgtagcgacaggtctaagatctgactgcctcctcctttctctggcctcttcccccttccctcttctcttcagctaggctagctggtttggagtagaatggcaactaattctaatttttatttattaaatatttggggttttggttttaaagccagaattacggctagcacctagcatttcagcagagggaccattttagaccaaaatgtactgttaatgggtttttttttaaaattaaaagattaaataaaaaatattaaataaaaaaaaaaaa

SEQ ID NO: 1812 - DNA, 326 bp, Homo sapiens
  misc_feature (298)..(298): n equals a,t,g, or c
  misc_feature (311)..(311): n equals a,t,g, or c
  misc_feature (323)..(323): n equals a,t,g, or c
gggccgcgtgagcaggcgcgcaacgcgagctgcccggcagggggcaggcccgccgaccgccgcttccggccgcccaccaacctgcgcagcgtgtcgccctgggcctacagaatctcctacgacccggcgaggtaccccaggtacctgcctgaagcctactgcctgtgccggggctgcctgaccgggctgttcggcgaggaggacgtgcgcttccgcagcgcccctgtctacatgcccaccgtcgtcctgcgccgcacccccgcctgcgccggcggccgttccgtctacaccgaggccnacgtcaccatccnagtgggctgaanctg

SEQ ID NO: 1813 - DNA, 868 bp, Homo sapiens
  misc_feature (6)..(6): n equals a,t,g, or c
  misc_feature (13)..(13): n equals a,t,g, or c
  misc_feature (21)..(22): n equals a,t,g, or c
  misc_feature (821)..(821): n equals a,t,g, or c
  misc_feature (840)..(840): n equals a,t,g, or c
  misc_feature (866)..(868): n equals a,t,g, or c
acgggntactaangggggacnnaacggaataacccttctaccataagaagtaaaaaacgatgtttatatgttaagaaatgtaacagagtagctctcatttgataatataaaatagctctgcctctattcaaaacagttgattttaaaagtaggtatatagtcgctatacttattattatttttagattgctttaaaaagcatatgcgtccctatctctttggcaagcacccagcggtgagtcacgccctgcacccgcagcagccgatctgagaggctcctcaggragcctccgtgaacttttccaaaccctccatgcgggccgcacacaggatgcccgtgccgggtcgtttcccatcagcttccagccacgctgcttgcttgtagctaaaagcaagccagggatgcccgtgtcagatgaagctgcttacgagtctccatggaaaggcggcgctggtgctccggcacttggtttgctcggtgcactctcttcagaggtcgccgaccgagccctccaggcggctccagcttgggcgcctcgggatgcgggccggggagacctyccggggcaggaccggcctcargggccagcgggcgcgtcgttggggcccagcaggagcttggcgccctgtttgtcgatgctggagttgatgctgtctgcgtccttctccggctcggggacgcaggtgcagcccacggggatggtgacgtaggcctcggtgtagacggaacggccgccggcgcaggcgggggtgcggcgcaggacgacggtgggcatgtagacaggggcgctgcggaagcgcacgtcctcctcgccgaacancccggtcagagagcttccnttaaagttccccttaagacccccttnnn

SEQ ID NO: 1814 - DNA, 818 bp, Homo sapiens
  misc_feature (81)..(81): n equals a,t,g, or c
  misc_feature (85)..(85): n equals a,t,g, or c
  misc_feature (765)..(765): n equals a,t,g, or c
  misc_feature (808)..(808): n equals a,t,g, or c
  misc_feature (810)..(810): n equals a,t,g, or c
  misc_feature (818)..(818): n equals a,t,g, or c
tttcttttttttttttcagcaagcctcttttaatgatttaaaaaagaactactaacttttacaaataattgtgttcagagncagnctttcaatctaaagaaaagatcaaggacctagctctcgtggcagaatgcagaaacagaagcctccagattgatctctgcagatgctaacgtggcccactttgtcctcatattcagcctgatcctaaagcccttacaactaagccaatacctgcttggattcttctgacaactggcaaagatgtcacgttccacttcttatctcaccacctcttaaccacaaattggccccagtggctttcaaaagggggaaaaaattgtgcgagtttgagactgtttatgtattcatgactaaaaccaaatctgagatctttggaactcttagctggccctggggcatgcgagccgcctgtgcatccctttggtccacctggaggcccgtgaagaccttcagtggaaggaagagtgggtcagatgagacgtgtccatttcatcagtcagccatcggtgacaggctgaattcagagacccaggccagagtgtaccagctacaaaatttatccaaggattccaattatgctttaaaaaattctaccagaagaagtaaaaaacgatgtttatatgttaagaaatgtaacagagtagctctcatttgataatataaaatagctctgcctctattcaaaacagttgattttaaaagtaggtatatagtcgctatacttattattatttttagaangctttaaagggcatktcccgttctgycccccttagaycccgtnangcaccctn

SEQ ID NO: 1815 - DNA, 1636 bp, Homo sapiens
gttttttttttttttttttcagcaagcctcttttaatgatttaaaaaagaactactaacttttacaaataattgtgttcagagacagactttcaatctaaagaaaagatcaaggacctagctctcgtggcagaatgcagaaacagaagcctccagattgatctctgcagatgctaacgtggcccactttgtcctcatattcagcctgatcctaaagcccttacaactaagccaatacctgcttggattcttctgacaactggcaaagatgtcacgttccacttcttatctcaccacctcttaaccacaaattggccccagtggctttcaaaagggggaaaaaattgtgcgagtttgagactgtttatgtattcatgactaaaaccaaatctgagatctttggaactcttagctggccctggggcatgcgaggcgcctgtgcatccctttggtccacctggaggcccgtgaagaccttcagtggaaggaagagtgggtcagatgagacgtgtccatttcatcagtcagccatcggtgacaggctgaattcagagacccaggccagagtgtaccagctacaaaatttatccaaggattccaattatgctttaaaaaattctaccagaagaagtaaaaaacgatgtttatatgttaagaaatgtaacagagtagctctcatttgataatataaaatagctctgcctctattcaaaacagttgattttaaaagtaggtatatagtcgctatacttattattatttttagattgctttaaaaagcatatgcgtccctatctctttggcaagcacccagcggtgagtcacgccctgcacccgcagcagccgatctgagaggctcctcagggagcctccgtgaacttttccaaaccctccatgcgggccgcacacaggatgcccgtgccgggtcgtttcccatcagcttccagccacgctgcttgcttgtagctaaaagcaagccagggatgcccgtgtcagatgaagctgcttacgagtctccatggaaaggcggcgctggtgctccggcacttggtttgctcggtgcactctcttcagaggtcgccgaccgagccctccaggcggctccagcttgggcgcctcgggatgcgggccggggagacctcccggggcaggaccggcctcaggggccagcgggcgcgtcgttggggcccagcaggagcttggcgccctgtttgtcgatgctggagttgatgctgtctgcgtccttctccggctcggggacgcaggtgcagcccacggggatggtgacgtaggcctcggtgtagacggaacggccgccggcgcaggcgggggtgcggcgcaggacgacggtgggcatgtagacaggggcgctgcggaagcgcacgtcctcctcgccgaacagcccggtcaggcagccccggcacaggcagtaggcttcaggcaggtacctggggtacctcgccgggtcgtaggagattctgtaggcccagggcgacacgctgcgcaggttggtgggcggccggaagcggcggtcggcgggcctgccccctgccgggcagctcgcgttgcgcgcctgctcacgcggccccagctgcagcgtgtggtggaaggcactgagcacggcacgagctcgtgcc

SEQ ID NO: 1816 - DNA, 1635 bp, Homo sapiens
ttttttttttttttttttcagcaagcctcttttaatgatttaaaaaagaactactaacttttacaaataattgtgttcagagacagactttcaatctaaagaaaagatcaaggacctagctctcgtggcagaatgcagaaacagaagcctccagattgatctctgcagatgctaacgtggcccactttgtcctcatattcagcctgatcctaaagcccttacaactaagccaatacctgcttggattcttctgacaactggcaaagatgtcacgttccacttcttatctcaccacctcttaaccacaaattggccccagtggctttcaaaagggggaaaaaattgtgcgagtttgagactgtttatgtattcatgactaaaaccaaatctgagatctttggaactcttagctggccctggggcatgcgagccgcctgtgcatccctttggtccacctggaggcccgtgaagaccttcagtggaaggaagagtgggtcagatgagacgtgtccatttcatcagtcagccatcggtgacaggctgaattcagagacccaggccagagtgtaccagctacaaaatttatccaaggattccaattatgctttaaaaaattctaccagaagaagtaaaaaacgatgtttatatgttaagaaatgtaacagagtagctctcatttgataatataaaatagctctgcctctattcaaaacagttgattttaaaagtaggtatatagtcgctatacttattattatttttagattgctttaaaaagcatatgcgtccctatctctttggcaagcacccagcggtgagtcacgccctgcacccgcagcagccgatctgagaggctcctcagggagcctccgtgaacttttccaaaccctccatgcgggccgcacacaggatgcccgtgccgggtcgtttcccatcagcttccagccacgctgcttgcttgtagctaaaagcaagccagggatgcccgtgtcagatgaagctgcttacgagtctccatggaaaggcggcgctggtgctccggcacttggtttgctcggtgcactctcttcagaggtcgccgaccgagccctccaggcggctccagcttgggcgcctcgggatgcgggccggggagacctcccggggcaggaccggcctcaggggccagcgggcgcgtcgttggggcccagcaggagcttggcgccctgtttgtcgatgctggagttgatgctgtctgcgtccttctccggctcggggacgcaggtgcagcccacggggatggtgacgtaggcctcggtgtagacggaacggccgccggcgcaggcgggggtgcggcgcaggacgacggtgggcatgtagacaggggcgctgcggaagcgcacgtcctcctcgccgaacagcccggtcaggcagccccggcacaggcagtaggcttcaggcaggtacctggggtacctcgccgggtcgtaggagattctgtaggcccagggcgacacgctgcgcaggttggtgggcggccggaagcggcggtcggcgggcctgccccctgccgggcagctcgcgttgcgcgcctgctcacgcggccccagctgcagcgtgtggtggaaggcactgagcacggcacgagctcgtgcc

SEQ ID NO: 1817 - DNA, 1345 bp, Homo sapiens
agaaaatcaaatcaatgtgccattcttccaggcgcgaggcagcagcggctgagttcaacatgaaaggaggcttcctccctgcctgctaattacctgctcttcccgatctcatcgtttctgcctttgcaaagtgctactgagaagcgggaagaaacgtccgccacccatcccccttgctgcctgggggttcagacttgattgtgaaaccccattggcttcattggctccttgatttaaaccacgcccggctttctgccctctttgctgctgctgggccaggttgcccagccatatcccagccccgtctgcagggagccggaggctgctgctgctgctattgtgtggatgccgcgcgtgtcttctcttctttccagagatggctaacaggggcccgagctatggcttaagccgagaggtgcaggagaagatcgagcagaagtatgatgcggacctggagaacaagctggtggactggatcatcctgcagtgcgccgaggacatagagcacccgccccccggcagggcccattttcagaaatggttaatggacgggacggtcctgtgcaagctgataaatagtttatacccaccaggacaagagcccatacccaagatctcagagtcaaagatggcttttaagcagatggagcaaatctcccagttcctaaaagctgcggagacctatggtgtcagaaccaccgacatctttcagacggtggatctatgggaagggaaggacatggcagctgtgcagaggaccctgatggctttaggcagcgttgcagtcaccaaggatgatggctgctatcggggagagccatcctggtttcacaggaaagcccagcagaatcggagaggcttttccgaggagcagcttcgccagggacagaacgtaataggcctgcagatgggcagcaacaagggagcctcccaggcgggcatgacagggtacgggatgcccaggcagatcatgtaggacgcggcatcctgcccctggtagagaggacgaatgttccacaccatggtctctacgaaaaagaaatagttagtcaccttctgaccttctcctctttctcaaagccttctgtccctggtttttgcaagtgctgcatttccgccgagaatccgcgttgcctactgctgccacctcctgttcatttagaactatgcaaagactccgcttccrttttcctgagctcctcgggccccagagtctctgtttgattatttatttatttatttatttatttgccaaaaattctcctcttcaacttatagaatgcacctaataaagtaattagtcttgtgtcaaaaaaaaaaaaaaaaaaactcgagggggggccgg

SEQ ID NO: 1818 - DNA, 2863 bp, Homo sapiens
  misc_feature (574)..(574): n equals a,t,g, or c
gcrgasgcstgcgggaagccaagatggcgcataggggttctccaggctgcagttggcgccttatcagtatctaagcggagtgttttggaaggagttaaggggctgtggcaaacgccctctccgccgtcatggcccggcatcggaatgttcgaggctataactacgatgaagattttgaagatgatgatctctacggccagtctgtagaggatgattattgtatttcgccgtcaacagctgctcagtttatttattcacggcgtgacaaaccttccgttgagcctgtggaagaatatgattatgaagatctgaaagaatcttccaattctgtttcaaaccatcagctcagtggatttgatcaagctcgtctttattcatgccttgatcacatgagagaggtacttggagatgctgtgccagatgaaatattaattgaagcagttctgaagaacaagtttgatgtgcagaaggctttgtcaggggttctggaacaagatagagtgcagagtttgaaggacaagaatgaggcaacagtatctacaggaaagatagcaaaaggaaaaccagtagattnccagacatcgcgaagtgaatctgaaattgtgccaaaagttgctaaaatgactgtatctggaaagaagcaaactatgggatttgaagtgcctggagtrtcttctgaagaaaatggtcatagtttccacacacctcaaaaaggaccgcccattgaagatgccattgcttcttccgatgttcttgagactgcttctaaatctgctaatccaccccacacgattcaagcatcagaagagcagagttcaaccccagcaccggtgaaaaagtctggcaagctgaggcagcaaatagatgtgaaggcggaactggagaagcggcaaggagggaagcagctactcaacttagtggtcattggtcatgttgatgctgggaaaagtactctgatgggccatatgctttatcttctgggtaatataaacaaaagaactatgcataagtatgaacaggagtctaaaaaggctggcaaagcttcgtttgcatatgcatgggtcttggatgaaactggcgaagaaagggaaaggggagtaaccatggatgttggtatgacaaagtttgaaaccacaaccaaagttattacattaatggatgctccaggccataaggacttcattccaaatatgattacaggagcagcccaggcggatgtagctgttttagttgtagatgccagcaggggagagtttgaagctggatttgagactggaggacaaacacgagagcatggactcttggtccgttctctgggagtgacgcagcttgcagttgcagttaataaaatggatcaggttaattggcaacaagaaaggtttcaagagattactggaaaacttgggcactttcttaagcaagcaggttttaaggagagtgatgtaggttttattcctacaagtggtctcagtggtgaaaatctaatcacaagatctcagtcaagtgaactcacaaaatggtataaaggactatgtttattagaacaaattgattcctttaagcctccccagcgatctattgacaaaccttttagattatgtgtgtccgatgttttcaaagatcaaggatctggattttgcataactggtaaaatagaagctggttatatccaaactggtgaccgactactggcaatgcctcctaatgaaacttgtaccgtgaaaggaatcactctgcatgatgaacctgtcgactgggcggcagcaggcgatcatgttagtcttactttggttgggatggatatcatcaaaatcaatgttggctgcatattttgtggccccaaagtacccattaaagcttgcactcgtttcagagcccgaatcctcatctttaatattgaaattcctatcactaaaggatttcctgtgctgttacactaccaaactgtcagtgaacccgccgttattaaacgattgattagtgtcttaaacaaaagcacgggtgaagtcacaaagaaaaagcctaagtttttgactaaaggccagaatgcattggtagagctacagacacaaagaccaatagctcttgagctatataaagacttyaaagagctggggaggttcatgctacgttacggtggttctacaatagctgctggtgttgtcactgagataaaagaatgatgggtcagaatttctaccacgtttctggatacagtgaaatagctaacctctgtttcaagaatgcagttattaagtcaaaggaacaatgtgcaattgatatgtttttagatgagagagaaaaattaaagctaaaattagctgcaaagaagtattaataatcacctctgcaaaaattctaagttgccaactggcaaagaaagtctaatgttaaaaacaactttgcctttgaaacgttaataaatggatttactttgctaagatttatggcaagtgtcaaaaatagtatctgaagatactgaatcatcatgaaatgaactctacttctggccaaagcacaatgtatttgcagttttctcttttgattcaattatactgcacatgttttaaggaaaagtaacttaattgggtttttcaggcagttgatatttgacctaagcttttttttttttttttttccagttaatgctaagaaaagatttggggaaggttataataaaagtattttgtggtgaccataagaatgtccctccccaaacaagtaaacttgtgaaagtttaatttggaattagtggaagctgttcctttgaaagccaagatattatttaagttgtaaagccagctaataaaatgccttagtttgagcataaaaaaaaaaaaaaaaaaaaaaaaaaaaactcgag

SEQ ID NO: 1819 - DNA, 1585 bp, Homo sapiens
  misc_feature (1540)..(1540): n equals a,t,g, or c
  misc_feature (1579)..(1579): n equals a,t,g, or c
gaattcggcacgagcaagccttcaactttcgcagagaaaatgctcaaaaacttcagtttcagcagtgcccagcaaagggcaagtgcggtcttcaaggaggagctgggagatgatgagcgatgggaggcaagcgtggggactggcgggaaggcgggagcagctgaggggatcccagtggacccaaactacaagttggggcttgcagggagcctctgctgaaggtagtaggaaatgtgcttcttactgctcccttgtctctctaatactcctcttagttcttttcctcttgcataccttttatttctggctaagtgttgggcattgttgtacattttctagcttgactcccttgggcaagttactttctgtctctgtgcctttgtgtcttcatgtttaagatggaaagaactgcagtgttgacctcctagggctgtygttagaagccattgaagacacagagaatacttagaataatagttggaacttggcaggccctgagttaattcacygscatcattgtcctcgtgcttcatagcagtarccgtgttgctgctcttagcctcagttctttcatgggcttctttcggttccttggaggctcccaagcaaaggtttttcagcacctctgttctgtgaaaaagarattaagcattttcagtatatttaaagttatctccagcctattgtgatgatgccttttctccaaaamccttttttattttcgttttattgtaggcacaaatctttctaatgcaratgcttaatttttcccaaaaarcaacttamtcctttcaacaaggktttctatttggtcaycacatctgcatycttccaaraarcccactggtaaataatggaacaatgaagcagtgtcgccactaaagagtaatctgcaaccacacagaagctggaatcccaagtacctgtcattatattctcctacacatgtgcagagtttgataaaaagagagagccagttttattattcctttaagaggaaaaaactgccaagaactcctaagctttaattaccaaaataagcttgccttaaacaaattcaaacactgamcacaaagtagaagatcaaatgcattttgtggccccatgcacwtatatcttccmtgagcttgtatctycaaggtaacagtgctgcgtctttaatacccattagcgctgcactgtctaaatggtgcacgccagaaaagagccgtctctaggtgtctcaatgaaccatgaaaaatctcagggaaaatgtattaatatatttttcagcaaatcctttgagatgaggattctcaggaaggattttagtgcattatgcaatgtagttgaattccctcttcagtattgaatatgctttgctttattccaaagagctcaacctcttcctatagacattgaaattcatctgtttcattcatagcaccacgtaaactttttatttttgtctcaaacttctctgataagcttgcctctgcatacaaaaacatcaaagcctgtggtgaaaaattattagaaaaaaaaaaaaaaaaaactcganggggggggccgggtacccaattccgccctataagtgaantcgtat

SEQ ID NO: 1820 - DNA, 1529 bp, Homo sapiens
ttttttttttttttttttctaataatttttcaccacaggctttgatgtttttgtatgcagaggcaagcttatcagagaagtttgagacaaaaataaaaagtttacgtggtgctatgaatgaaacagatgaatttcaatgtctataggaagaggttgagctctttggaataaagcaaagcatattcaatactgaagagggaattcaactacattgcataatgcactaaaatccttcctgagaatcctcatctcaaaggatttgctgaaaaatatattaatacattttccctgagattttcatggttcattgagacacctagagacggctcttttctggcgtgcaccatttagacagtgcagcgctaatgggtattaaagacgcagcactgttaccttgaagatacaagctcatggaagatatatgtgcatggggccacaaaatgcatttgatcttctactttgtgttcatgtgtttgaatttgtttaaggcaagcttattttggtaattaaagcttaggagttcttggcagttttttcctcttaaaggaataataaaactggctctctctttttatcaaactctgcacatgtgtaggagaatataatgacaggtacttgggattccagcttctgtgtggttgcagattactctttagtggcgacactgcttcattgttccattatttaccagtgggcttcttggaagaatgcagatgtgatgaccaaatagaaaaccttgttgaaaggagtaagttgctttttgggaaaaattaagcatctgcattagaaagatttgtgcctacaataaaacgaaaataaaaaagggttttggagaaaaggcatcatcacaataggctggagataactttaaatatactgaaaatgcttaatctctttttcacagaacagaggtgctgaaaaacctttgcttgggagcctccaaggaaccgaaagaagcccatgaaagaactgaggctaagagcagcaacacggctactgctatgaagcacgaggacaatgatggcagtgaattaactcagggcctgccaagttccaactattattctaagtattctctgtgtcttcaatggcttctaacaacagccctaggaggtcaacactgcagttctttccatcttaaacatgaagacacaaaggcacagagacagaaagtaacttgcccaagggagtcaagctagaaaatgtacaacaatgcccaacacttagccagaaataaaaggtatgcaagaggaaaagaactaagaggagtattagagaagacaagggagcagtaagaagcacatttcctactaccttcagcagaggctccctgcaagccccaacttgtagtttgggtccactgggatcccctcagctgctcccgccttcccgccagtccccacgcttgcctcccatcgctcatcatctcccagctcctccttgaagaccgcacttgccctttgctgggcactgctgaaactgaagtttttgagcattttctctgcgaaagttgaaggcttgctcgtgcc

SEQ ID NO: 1821 - DNA, 254 bp, Homo sapiens
  misc_feature (11)..(11): n equals a,t,g, or c
  misc_feature (21)..(21): n equals a,t,g, or c
cccttcgctgncgccataaanctcttcaccaaagagcccctaaaacccgccacatctaccatcamcctctacatcaccgscccgascttagctctcaccatcgctcttctactatgaacccccctccccatacccaaccccctggtcaacctcaacctaggcctcctatttattctagccacctctagcctagccgtttactcaatcctctgatcagggtgagcatcaaactcaaactacgcccggatcggcgc

SEQ ID NO: 1822 - DNA, 4346 bp, Homo sapiens
  misc_feature (4346)..(4346): n equals a,t,g, or c
gcggacgcgtttggcaacagcgagggcaaagagctggtggcctcaggtgaaaataaaataaaacagggtctgttacctagcttggaagatttgctgttctatacaattgctgaaggacaagagaaaatacctgttcataaatttattacagcactcaaatctacaggattgcgaacgtctgatcccaggttgaaagagtgtatggatatgttaagattaactcttcaaacaacatcagatggtgtcatgctagacaaagatctttttaaaaaatgtgttcagagcaacattgttttgttgacacaagcatttagaagaaagtttgtgattcctgactttatgtcttttacctcacacattgatgagttatatgaaagtgctaaaaagcagtctggaggaaaggttgcagattatattcctcaactggccaaattcagtcccgatttgtggggtgtgtctgtttgtacagtagatggacagaggcattctactggagataccaaagttcccttctgtcttcagtcctgtgtaaaacctttgaaatatgccattgctgttaatgatcttggaactgaatatgtgcatcgatatgttggaaaagagccgagtggactaagattcaacaaactatttttgaatgaagatgataaaccacataatcctatggtaaatgctggagcaattgttgtgacttcactaataaagcaaggagtaaataatgctgaaaaatttgactatgtcatgcagtttttgaataagatggctggtaatgaatatgttggattcagtaatgcaacgtttcagtctgaaagagaaagtggagatcgaaattttgcaataggatattacttaaaagaaaagaagtgttttccagaaggcacagacatggttggtatattagacttctacttccagctgtgctccattgaagtgacttgtgaatcagccagtgtgatggctgcgacactggctaatggtggtttctgcccaattactggtgaaagagtactgagccctgaagcagttcgaaatacattgagtttgatgcattcctgtggcatgtatgacttctcagggcagtttgctttccatgttggtcttcctgcaaaatctggagttgctgggggcattcttttagttgtccccaatgttatgggtatgatgtgctggtctcctcctctggataagatgggcaacagtgttaagggaattcacttttgtcacgatcttgtttctctgtgtaatttccataactatgataatttgagacactttgcaaaaaaacttgatcctcgaagagaaggtggtgatcaaagggtaaagtcagtgataaatcttttgtttgctgcatatactggagatgtgtctgcacttcgaagatttgctttgtcagctatggacatggaacagcgggactatgattctagaacagcactccatgtagctgctgcagagggtcatgttgaagttgttaaatttttgctggaagcctgcaaagtaaaccctttccccaaggacaggtggaataacactcccatggatgaagcactgcactttggacaccatgatgtatttaaaattctccaagaataccaagtccagtacacacctcaaggagattctgacaacgggaaggaaaatcaaaccgtccataagaatcttgatggattgttgtaatggtctcaaatcccaagatttaaatcacttacctatttaattgtggaaaatgattatgaagaacatgtgtatttctatctggtagtgatgtatattttacatttgtcatttcagtgttactggagttttcttcattgtgcacacaggacaaatctgatctctttgggaaaaaatagaaataaaacaatctccctccataatgtgagcaatattacctcgtgcattgtataatttgatgtaaaagaaatagttaccaatgctagcttgtgtggtcttccatgatttatttgtgttttgtgaattttcaatttatggtgatgatctgctgatatgcatttataaagtaagctctgttgtacagtctgtccaaatgggtcaaggttgcctttagaagcaaatagtgtgattttcaagacttcaaatacaaatttagtttaagtgtttgaacaactatatgcacttacggttgtgtgtttaaaatgtctctctcwcmccctagcttcatgatgtgactcttaaaaaactataatagttaacaactgttagtaagatagaccaattctgattagactttatcagggaatctgtttaagatatgtttggtgaccaaaacgtatgtgtgaatgtagttataatgcttttgaaaaattttcctttttctatatccccttagtccagcctctcttctcagacatttagctatctgcctctttcctttagctgggaaagtgagagctggcatactatgcagtttttatgttttccatagtaagtcagaaaatgcctcctatttctggcatcagaactttgccatttgtctacagaagacgaaccagagacaaaattactaagtataaattagtcaagtttatcagtctaaaaagcgaagggatgtgcaactgcagctctttaagaagttttttttttttagcttctagggtaaagataaattcagaaatgctctaagctaccaaagttattctgaaagtatgggaactgctacaactaacaaacatttgtttccaagcctgtcattaagagtctgcatcaagagatttgtcctccttgggggaccactggatcattccagatttcttgtgatttttctattgtgtaattcttggtgggctctgtagtttaataataagaaaaaggccatttcattttaaattgtgacctataattctttgtcttgggttggtaattcaggattcatttggaaagtgggtaaaaggggcttcaaaaaacggatagaacaggattttctaggagttacacatacattttatcctgtcatacctcgagataaagtggcatgttagtgaggagttctgatattaagcacacacacacatgcacacaaatggacttctctgaagctgtgtttagtgaaatgagctcaagtacatgaatgttagttgttatcacatacagcaaattcctttttttttctttttctatgagcacactctgctgcttctaaactttacatgcctgatggcaccttactccagcagcctccaggtgctttcattttcacttccagtctaagccagtggctcctgccactgccctcccattacctagatggcacctcctttggtgaaaccacggccaatgttccttagctgcaccaggcccgaagctgttcccatgcttgagcttccatggggaggatgctgagtgagcagtttcctacgccgtggatctagcaagccatggagacaggtagcatttgtaagatgctgcacaggagcagcattatccccaaagatattacagggtagacacgttttaactgaaatcaatcaagataactttattcaaagagcagcccgctttgtgtgactaaaatgaaacaagacagttgaattgtgtgacttgaagattaccaatgattttgaggcttttctataataaaaagaggttctaaccattatttgggaacaaagagagttttcatcttttttcagatcaaaaccattctgtaaaatctttgttgtttaattaaatgtgccgttatttacccctgatgttatttatgactatgtgccgattcctgcttgggctgtttgctgttggctggtaataatatatttgatttaaatgctgttgactgtgctattaactgctgccgtcagtaaactccaaagatctttttgttttggctttagtatcatatgtgctttttctgtatcctgagcgctctatatgatcatgttaatttaaagctttatacacattgttgtttttgctggtctcatctttggtaatatgctataccccactgctgcccgacactgccctttagctgcagagctggattagctgttgaccatttgatgctgttgtctgtctggcagggactgaatgacctgatgtcagatttagattcttcctggggattacacagctatgaatgtatttgcttctaaaacctcccaaagtgaatctaatcttaaaactacaagttgtaagtattctgaaattgggaaacatttattttaaatgcaatcaggtagtgttgctttttacagcataataaatatatgtatcaaaaaaaaaactgtgtggaaaaaatgaattttcttaaaacaattaagagccaggaactccactgagcatacagaccatctctggttaggttccaatccatttctaatgcctgn

SEQ ID NO: 1823 - DNA, 454 bp, Homo sapiens
  misc_feature (121)..(121): n equals a,t,g, or c
  misc_feature (192)..(192): n equals a,t,g, or c
  misc_feature (450)..(450): n equals a,t,g, or c
tccagtttcaggggttaaggttgtaatctttgaaagtcgcggtaaacccttttttggcaggcataattgtgggcaaagtcgagcagtttcgggcgcatccaagcggttttttccgggggtnatagggcagataaagtaagtgatatttgttgatgccccagcgtgtggtagggcaagaaaatgaatttcgcnaacgtgcagctygtyggcggcaaaatcggtaatggcttttacagaggtttcgtcggcattaaagccctgaatcagcggcacgcggataatgatttttttgcccgctgcggcgagttttttcaggttatccagcactctggcggcgttaccgtcggtccactgtttaaacggcgcgtcggcaacgtgttttaaatcggcaagaaacagatcgatatagggcararaaggggcccggtacccattcccccctatattganttcc

SEQ ID NO: 1824 - DNA, 2684 bp, Homo sapiens
  misc_feature (2417)..(2417): n equals a,t,g, or c
ccgaattcccgggtcgacccacgcgtccggagactgaaaatatgatggaccgaattgtgactggcttgtctgagtctagtgwcaaggtgcggttagctgccgtcagatgtttgcacagyttatccagatctgtgcagcagcttcgaaccagtttccaggatcatgctgtttggaaacctttaatgaaggttttacaaaatgcaccagatgaaatcctagtggtagcatcttccatgctgtgtaatcttcttcttgaattttctccaagcaaagagccaattttggaatcaggagccgtagagctactttgtggattaactcagagtgaaaatcctgctttacgagtgaatggaatttgggctttaatgaatatggcatttcaggctgaacaaaaaataaaagcagatattttacgaagcttgagtactgaacagctattccggttattatcagattcagatttgaatgtgctgatgaagacattgggacttcttagaaatctcctctccactcgtcctcatatagataaaataatgagtactcatggaaagcaaattatgcaagccgtcactcttattctagaaggggaacataacattgaggtcaaagagcagacactgtgcatcttagccaacatagcggatgggacaacagcaaaagatcttattatgaccaatgatgatatcctacagaaaatcaagtattacatgggccattcacatgttaaactgcagcttgcagccatgttttgtatatcaaacctcatatggaatgaagaggaaggttcacaagaacgccaggataaattacgagacatgggcatcgtagatattctacacaaactgagtcagtcaccagattcaaacctttgtgacaaggcaaagatggcactgcagcagtacctggcatgatgggagtgcccctgggcacctgcgagcatcccacctccttgtttaaggaagtacaggaaccagcctcatttgattccttctatttgcacaagtcaccttggactgcagggagctgttttgcaaaagcagtttagtaggcttagatctcaaattcatcttgagaacatttttttgaggtagtaatttcctcagaagactcttgtgttttgttttggtttttttttctgagctactcggactctttattagaacaatcaatcattttcctttggacctacaatttttgcctatgctgcagccactttgtgagtgagaatgaatatgtctgtgtgaacacacaggcatgcgtgtgtatgtgcacgtacatgggccagaatgaatggatgtgtgtgtgtgagggatacctcagatttttcttttcttattttgtgtgaaaatctcttttctacagattttccagggtttaagcattgcttgctgtataaaaaactttactgaattatatacagtttgaatgaaatgttattttaaaaacaaaacaattgttaagtgttccataaaggttatgttgaattttggtcagatgaatatttgtaagtaaaaaatatatgcatttctgaacctcaacttacatagattttctttatataaaaaaaaagaaaaaaaaagaaaaagttggctatagttggcctgattaacaggcactatacatggtgctgtgcaaaatagtaagctagcatcttactgccgtcaatattagcaggtacagagccttttttcatcctaattcagtaagttctcaggcttycaagtcaaatggagaagtaaagtgaggcaacagattcaccataggctttttgaagcatcaaagggaaatataactactgatagtgaaagcccagccatgacccagatgggcttacccttgacaggaactggggaccaagagcctcccaattgccctaactcctgtcattggtattagcaatatctggccagatttagaaccagtcatggaaacttgtgctcaaactaaaagtaggtcatcacttcccagaaacagaataccttgtgcttcctgaaacagcatatatcactgtgaaactaaagaatattctacagacacccctgtagaaagaaacaaagaacaggatagtttagaaagctttctgttagctgtattcagcaaatttcatactagttgctcaggactgctagttggtatgcttttgtaaaacgagattgaaatttaataaaagatgcaactaaaatctttcctgcatgaagctaaaagcactcaagttgagagaggggcaagggaatctccccaggatgactgaagatgacttctttttacagcaagtactgttagcctttctgcaccccttagcttggcccctgctccaacttctgggtcagcagcaaggtgaactcaacagaagttgctcttgactgtttgaaggtagaagcagcctaccttttctctttgctaaaagaaggtcaaangcttcgcaaccaggatgcaaggtctgcggtccagaagcttgcggtgagtgtgtgccactgatggagctccaagcccacccaccagccactcctgatggggttgctcacactgcagctgccctatcaccaccctgcacgttccttggaagatttaaatgtttggttgcaaatgaatgttttaaaaatgtatttaatgcaatttttcctgctctcaacatgaccacccaagattcaaacacaaaaaaaaaaaaaaaaaaaaaaaaaaaa

SEQ ID NO: 1825 - DNA, 571 bp, Homo sapiens
ttgcacaagtcaccttggactgcagggagctgttttgcaaaagcagtttagtaggcttagatctcaaattcatcttgagaacatttttttgaggtagtaatttcctcagaagactcttgtgttttgttttggtttttttttctgagctactcggactctttattagaacaatcaatcattttcctttggacctacaatttttgcctatgctgcagccactttgtgagtgagaatgaatatgtctgtgtgaacacacaggcatgcgtgtgtatgtgcacgtacatgggccagaatgaatggatgtgtgtgtgtgagggatacctcagatttttcttttcttattttgtgtgaaaatctcttttctacagattttccagggtttaagcattgcttgctgtataaaaaactttactgaattatatacagtttgaatgaaatgttattttaaaaacaaaacaattgttaagtgttccataaaggttatgttgaattttggtcagatgaatatttgtaagtararaatatatgcatttmtgamcctcaaaaaaaaaaaaaaaaaaaaaaaaagatt

SEQ ID NO: 1826 - DNA, 1540 bp, Homo sapiens
  misc_feature (509)..(509): n equals a,t,g, or c
  misc_feature (1495)..(1495): n equals a,t,g, or c
  misc_feature (1510)..(1510): n equals a,t,g, or c
  misc_feature (1534)..(1534): n equals a,t,g, or c
atttcttatcagtgtaaccgtcagagaaaacgtgctccagcccaaaaaaacgttacaattgccgcccattactgaaaaccacagtaaagcgaggttttatgcgtaccgttttgaacattctgaactttgtgcttggcggatttgccaccactctgggctggctgttggcgactctggtcagtattgtgctgatttttaccttaccgctgacacgatcctgctgggagatcactaaactgtctctggtgccttatggcaatgaagctattcatgtcgatgaactgaacccggctggcaaaaatgtgctgctgaatactggcggtacggtattgaatattttctggctgattttctttggctggtggttatgcctgatgcacattgcaacgggcatcgcacaatgtatttcaatcattggcattcctgtcggcattgcgaactttaaaattgccgctattgcactatggccggttggtcgtcgcgtggtatcggtagaaacagcgcaagcngcgcgtgaagccaatgcacgtcgtcgttttgaataatccactaatatggcctttatgctaagtcctttgctcaaacgctatacctggaacagcgcctggctgwattacgcgcgwattttwattgcgctttgtgraaccacagcgtttccgtggtggctgggtgatgtaaaactgacgattccgctaacgctggggatggtggcagcggcgctgaccgatctcgatgaccgactggcgggacgtttgcgtaacctcatcattacgctgttctgcttttttatcgcctcggcctcagtagaattgctgtttccctggccctggctatttgcgattggcttaacgctctctaccagcggcttcattttgctcggcggtctgggtcaacgctatgcaacaattgccttcggtgcattgctgatcgccatttacactatgttgggaacatcactgtatgagcactggtatcagcagccgatgtatctgctggccggtgccgtctggtacaacgtcctgacacttattggtcatctgctgttcccggtccgcccgctgcaggacaacctggcgcgttgctatgaacaactggcgcgttatcttgagctcaagtcgcgcatgtttgatcctgatattgaagatcaaagccaggcaccgctgtacgatttggctctcgccaacggtctgctgatggcgacattgaatcagacgaaactctcgctgctgacccgcttacgtggcgatcgtggtcaacggggaacgcgtcgcacgctggcattattactttgtcgcacaggatattcacgagcgtgccagctcttctcatattcagtatcaaacattgcgtgaacattttcgccacagcgacgtgctgttccgttttcagcggctgatgtcgatgcagggccaggcgtgccagcaactgtcacggtgtattttgttgcgtcagctttattcaacatgatccgcatttttgagcgcgctttttacgnatattgatgctgcgntggagcggatgcgcgattaacggnggaacc

SEQ ID NO: 1827 - DNA, 977 bp, Homo sapiens
  misc_feature (928)..(928): n equals a,t,g, or c
  misc_feature (930)..(931): n equals a,t,g, or c
  misc_feature (933)..(933): n equals a,t,g, or c
cggacgcgtgggcggacgcgtgggggctggctgcagtctgtctgagggcggccgaagtggctggctcatttaagatgaggcttctgctgcttctcctagtggcggcgtctgcgatggtccggagcgaggcctcggccaatctgggcggcgtgcccagcaagagattaaagatgcagtacgccacggggccgctgctcaagttccagatttgtgtttcctgaggttataggcgggtgtttgaggagtacatgcgggttattagccagcggtacccagacatccgcattgaaggagagaattacctccctcaaccaatatatagacacatagcatctttcctgtcagtcttcaaactagtattaataggcttaataattgttggcaaggatccttttgctttctttggcatgcaagctcctagcatctggcagtggggccaagaaaataaggtttatgcatgtatgatggttttcttcttgagcaacatgattgagaaccagtgtatgtcaacaggtgcatttgagataactttaaatgatgtacctgtgtggtctaagctggaatctggtcaccttccatccatgcaacaacttgktcaaattcttgacaatgaaatgaagctcaatgtgcatatggattcaatcccacaccatcgatcatagcaccacctatcagcactgaaaactcttttgcattaagggawcattgcaagagcagcgtgactgmcattatgaaggcctgtactgaagacagcaagctgttagtacagaccagatgctttcttggcaggctcgttggacctcttggaaaacctcaatgcaagatagtggttcaatgctggcatattttgggaattctgccattcatggagtgcaataatctggatagctttcccaacttccacaaaatcaccccagttaatgggggngnngngggttttttttaagggaaccattactacttggaactttttttct

SEQ ID NO: 1828 - DNA, 1916 bp, Homo sapiens
  misc_feature (18)..(18): n equals a,t,g, or c
cactatagcgcccccycngagtttttttttttttttttttcaactttaaatcagtttattgacacagtaacacaacacacttgcctccctgacatccccgtccccctcacccaatctagatctctcccccttgctctccccttagaaaaagctgtttagtgaaaacagttaagggcaggccacttctacactcccagcgctaccctaggccctgcagagcagagtctcagacactactcggaacctggtggggaggcagctagtactatactcagccagccagaagtatccagtccctaagaacggattgccccacaattcccaggccctgagttgctatatattcctcttccttactgctgtttgtgaccccaagaaggagaccttggggcctgggcctgcagccaggagcaagaactcctggcagtgatttgagaattaattagagtttggctagtgttttaaaggcccaggcatcccccaaaaaagccctggtggtgggagtaaatttcaatgcccctatttaaaatgtactgataacattaaacagattaagccagcttaaccaaatgccagaataacactaagctgtaaagaaggaggggtcggacctgcttactccaggccagacgcaaatgcacacagagaagcccaggtaagagtgtcaaaaaacaactcaaggacactgcccagggactgaaaagcctatactcaggagcccctggggtgacaggaagcaaagaaagaaaatacacaagtcttaataaccaaaacagaaagccaacagcagggaaacctgagcctgacagtgctgcccaccagccctccaggccatgcccctgaacccagacagtccctccccctctaggcaatgtcctcccctaggctagatagaacacatcacacagcgcagtttagaaagcttctaatgccagttcataaacatcttcatttactattggtgattacatgtgaataatatgtttatactgttctttatggaaaacaatttcaacgagtcaactccgagaacacaataggcaaccctcaccctgagcccctcagtgtccttccctagacagcgaggagccctctcgtctgtcccagggctgcctaacttcccctcttcccccactgtggctcttgggtaaagcatcctctatgactattagtcctcatcggacaagttctggtccaggggataaaccatgaacatcacatctggccgagaggggacacagggatggcctggacgtacaatctcaaagcccaagaagctgaaggtcttcaggagtggagctctgtcttctcggcccttcctgaagcagatgaagacatagttcactttcatcttctcttcagcaaactctagcagtgctaacaatccttctttgctcccatcagctaataatccatctgggatttctacaaacaggctctggctggacaggactgcatcccaagaagagaccttcacctcggtgacctcatactggaagtggacgatgtgaggttttccatcattcacagggaggtcctgggtcacagtgagcttctcgtccttatatattagagctgagagagaaggatccctgccgccccctcgcccaccggggatcttcgacagtgggtgaggggcatcaggagcaccacagaggccctggaacaatgtgcctgcagcactggagctggggacagttactcaaaggcaaaatactactgtcctgggtgtttatcatcctcggcggctctgctcagggtgggaggaggcggcgcagggagtggatagatggatgagtgggtgggtgtggggtcacgcgcgcggggtcgatctctgcgggctaagtccctgtcaggccgcgggccgagcgcctccttttgcctcagcgagcgcctgcctccaactgaccctcccc

SEQ ID NO: 1829 - DNA, 2648 bp, Homo sapiens
  misc_feature (36)..(36): n equals a,t,g, or c
  misc_feature (94)..(94): n equals a,t,g, or c
  misc_feature (130)..(130): n equals a,t,g, or c
  misc_feature (2526)..(2526): n equals a,t,g, or c
  misc_feature (2565)..(2565): n equals a,t,g, or c
aattaacccggtatttcccggccttttgaagtgaancttgataccgcttcgccgcaagccgaaccgaccragcgcagcgagtcagtgascgagnaagcggaagagcgcccaatwcgcaaaccgcctctcnccgcgcgttggccgattcattaatgcagctggcacgacaggtttcccgactgaaagcgggcagtgagcgcaacgcaattaatgtgagttagctcactcattaggcaccccaggctttacactttatgcttccggctcgtatgttgtgtggaattgtgagcggataacaatttcacacaggaaacagctatgaccatgattacgccaagctcgaaattaaccctcactaaagggaacaaaagctggagctccaccgcggtggcggccgctctagaactagtggatcccccgggctgcaggaattcggcacgaggctgccatggggcccagcacccctctcctcatcttgttccttttgtcatggtcgggacccctccaaggacagcagcaccaccttgtggagtacatggaacgccgactagctgctttagaggaacggctggcccagtgccaggaccagagtagtcggcatgctgctgagctgcgggacttcaagaacaagatgctgccactgctggaggtggcagagaaggagcgggaggcactcagaactgaggccgacaccatctccgggagagtggatcgtctggagcgggaggtagactatctggagacccagaacccagctctgccctgtgtagagtttgatgagaaggtgactggaggccctgggaccaaaggcaagggaagaaggaatgagaagtacgatatggtgacagactgtggctacacaatctctcaagtgagatcaatgaagattctgaagcgatttggtggcccagctggtctatggaccaaggatccactggggcaaacagagaagatctacgtgttagatgggacacagaatgacacagcctttgtcttcccaaggctgcgtgacttcacccttgccatggctgcccggaaagcttcccgagtccgggtgcccttcccctgggtaggcacagggcagctggtatatggagaacactttgcagctaatcaaattccacctggcaaaccgaacagtggtggacagctcagtattcccagcagaggggctgatccccccctacggcttgacagcagacacctacatcgacctggcagctgatgaggaaggtctttgggctgtctatgccacccgggaggatgacaggcacttgtgtctggccaagttagatccacagacactggacacagagcagcagtgggacacaccatgtcccagagagaatgctgaggctgcctttgtcatctgtgggaccctctatgtcgtctataacacccgtcctgccagtcgggcccgcatccagtgctcctttgatgccagcggcaccctgacccctgaacgggcagcactcccttattttccccgcagatatggtgcccatgccagcctccgctataacccccgagaacgccagctctatgcctgggatgatggctaccagattgtctataagctggagatgaggaagaaagaggaggaggtttgaggagctagccttgttttttgcatctttctcactcccatacatttatattatatccccactaaatttcttgttcctcattcttcaaatgtgggccagttgtggctcaaatcctctatatttttagccaatggcaatcaaattctttcagctcctttgtttcatacggaactccagatcctgagtaatccttttagagcccgaagagtcaaaaccctcaatgttccctcctgctctcctgccccatgtcaacaaatttcaggctaaggatgccccagacccagggctctaaccttgtatgcgggcaggcccagggagcaggcagcagtgttcttcccctcagagtgacttggggagggagaaataggaggagacgtccagctctgtcctctcttcctcactcctcccttcagtgtcctgaggaacaggactttctccacattgttttgtattgcaacattttgcattaaaaggaaaatccacaaaaaaaaaaaaaaaaaactcgagggggggcccggtacccaattcgccctatagtgagtcgtattacaattcactggccgcgttttacaacgtcgtgactgggaaaaccctggcgttacccaacttaatcgccttgcagacatcccctttcgccagctggcgkaatagcgaaraggcccgcaccgatcgcccttcccaacagttgcgcagcctgaatggcgaatggcaaattgtaagcgttaatattttgttaaaattcgcgttaaatttttgttaaatcagctcattttttaaccaataggccgaaatcggcaaaatcccttataaatcaaaagaatagaccgagatagggttgagtgttgttccagtttggaacaagagtccactattaaagaacgtggactccaacgtcaaagggcgaaaaaccgtctatcanggcgatggcccactacgtgaaccatcaccctaatcaagntttttggggtcgaggtgccgaaagcactaaatcggaaccctaaagggagcccccgattaaagcttgacggggaaagccggcga

SEQ ID NO: 1830 - DNA, 1673 bp, Homo sapiens
ggcacgagctgccatggggcccagcacccctctcctcatcttgttccttttgtcatggtcgggacccctccaaggacagcagcaccaccttgtggagtacatggaacgccgactagctgctttagaggaacggctggcccagtgccaggaccagagtagtcggcatgctgctgagctgcgggacttcaagaacaagatgctgccactgctggaggtggcagagaaggagcgggaggcactcagaactgaggccgacaccatctccgggagagtggatcgtctggagcgggaggtagactatctggagacccagaacccagctctgccctgtgtagagtttgatgagaaggtgactggaggccctgggaccaaaggcaagggaagaaggaatgagaagtacgatatggtgacagactgtggctacacaatctctcaagtgagatcaatgaagattctgaagcgatttggtggcccagctggtctatggaccaaggatccactggggcaaacagagaagatctacgtgttagatgggacacagaatgacacagcctttgtcttcccaaggctgcgtgacttcacccttgccatggctgcccggaaagcttcccgagtccgggtgcccttcccctgggtaggcacagggcagctggtatatggagaacactttgcagctaatcaaattccacctggcaaaccgaacagtggtggacagctcagtattcccagcagaggggctgatccccccctacggcttgacagcagacacctacatcgacctggcagctgatgaggaaggtctttgggctgtctatgccacccgggaggatgacaggcacttgtgtctggccaagttagatccacagacactggacacagagcagcagtgggacacaccatgtcccagagagaatgctgaggctgcctttgtcatctgtgggaccctctatgtcgtctataacacccgtcctgccagtcgggcccgcatccagtgctcctttgatgccagcggcaccctgacccctgaacgggcagcactcccttattttccccgcagatatggtgcccatgccagcctccgctataacccccgagaacgccagctctatgcctgggatgatggctaccagattgtctataagctggagatgaggaagaaagaggaggaggtttgaggagctagccttgttttttgcatctttctcactcccatacatttatattatatccccactaaatttcttgttcctcattcttcaaatgtgggccagttgtggctcaaatcctctatatttttagccaatggcaatcaaattctttcagctcctttgtttcatacggaactccagatcctgagtaatccttttagagcccgaagagtcaaaaccctcaatgttccctcctgctctcctgccccatgtcaacaaatttcaggctaaggatgccccagacccagggctctaaccttgtatgcgggcaggcccagggagcaggcagcagtgttcttcccctcagagtgacttggggagggagaaataggaggagacgtccagctctgtcctctcttcctcactcctcccttcagtgtcctgaggaacaggactttctccacattgttttgtattgcaacattttgcattaaaaggaaaatccacaaaaaaaaaaaaaaaaaa

SEQ ID NO: 1831 - DNA, 633 bp, Homo sapiens
  misc_feature (628)..(628): n equals a,t,g, or c
ggtccagtgatgactgggggatcccggcaagtaacatgactaaaaagaagcgggagaatctgggcgtcgctctagagatcgatgggctagaggagaagctgtcccagtgtcggagagacctggaggccgtgaactccagactccacagccgggagctgagcccagaggccaggaggtccctggagaaggagaaaaacagcctaatgaacaaagcctccaactacgagaaggaactgaagtttcttcggcaagagaaccggaagaacatgctgctctctgtggccatctttatcctcctgacgctcgtctatgcctactggaccatgtgagcctggcacttccccacaaccagcacaggcttccacttggccccttggtcaggatcaagcaggcacttcaagcctcaataggaccaaggtgctggggtgttcccctcccaacctagtgttcaagcatggcttcctggcggcccaggccttgcctccctggcctgctggggggttccgggtctccagaaggacatggtgctggtccctcccttagcccaagggagaggcaataaagaacacaaagctgtaaaaaaaaaaaaaaaaaaactcgtagggggggcccgtacccaatcgccctntcgtg

SEQ ID NO: 1832 - DNA, 548 bp, Homo sapiens
ggcacgaggggcgtcgctctagagatcgatgggctagaggagaagctgtcccagtgtcggagagacctggaggccgtgaactccagactccacagccgggagctgagcccagaggccaggaggtccctggagaaggagaaaaacagcctaatgaacaaagcctccaactacgagaaggaactgaagtttcttcggcaagagaaccggaagaacatgctgctctctgtggccatctttatcctcctgacgctcgtctatgcctactggaccatgtgagcctggcacttccccacaaccagcacaggcttccacttggccccttggtcaggatcaagcaggcacttcaagcctcaataggaccaaggtgctggggtgttcccctcccaacctagtgttcaagcatggcttcctggcggcccaggccttgcctccctggcctgctggggggttccgggtctccagaaggacatggtgctggtccctcccttagcccaagggagaggcaataaagaacacaaagctgtaaaaaaaaaaaaaaaaaaaccggg

SEQ ID NO: 1833 - DNA, 149 bp, Homo sapiens
gcagggactcttggcgactagtctctgtggtgcacactctccaccctaccaccaaaaagcctcttcctcctgcttgccacctctcagtcacaagacggctgctgcgactcaggctcatgtcccaattcaaggcagcaagaaggccatgg

SEQ ID NO: 1834 - DNA, 4505 bp, Homo sapiens
  misc_feature (161)..(161): n equals a,t,g, or c
tttttttttttttttttttttgaaaattcaagctactcatgtttattaactgatctacatttgacaaaacaaagataggggcacaaagagctgtttgacaaagtcaaatcccaggtatcgaacaatagtattcccctggctgccctagaggcacttgtgcnactctgagggggatgtcctctgccatgcgaccgctcagttatcacactgcactgctgttgggttgcatgtggagtacaggtctgcatgcatctgacatcagagaagtggcccactaaacactaagagccctagttctagatgtcacaagttgatgttagtaaccaccaagtactaattctgtactaaaatggtcagaaaagataacaagctttgagtactgtgtaaaattataccctttatagggaataggctcttgtaagctgccttttaacttatttcctcccttgccaaagtctattcatttatgtcaaatcaagaacatacagcacaacattttctaaaaaagcactttaacaatggtcattaacttctccctaaggactcatgcctaaggttatttacataagatttgggatcttcataatttaggagaacttttaattctgagctcgggaagatatttctcctattagacaataggacactcagaaatacctgaggtataatcactgaaaaccttcttaaaggcgaaaaaaaaaaaagattgaggtttcctatactggcatgaaagtacacatacaatttttatcgtagaaaagactaaaatgtgaatagtgacaaaacataacagataaattgggaggaatcagctattaggctccaattcttcttactatattttgcagacaattctagtattatagagattatcaggatataccaaaaatgattttaggtagaaacttcaaaaaacagcaaaacccagttttaagacaggattcctttctagagacattacacaacagtatacacttaaggtgtttctggtggaacatcaacatcaatgtacttaaaaaaaatctaagcctggttctttttgatcagatgtgcttatttggctgctaatacacccccaccaccctgcctccaaagtgatcatttagtcattaattataaaaaagtatacaaattatactcaatacagagcacggcaagatctagttcaatttatagctttaagtaatacacataaatcggacaatttaacgttgtactactctctggccctacagtttcctacttcctgatgtttcctggaaactgtaactgtccaggcaacagaaacagtaattactttcttagggaacaaataaaaaattttaagaattgactaaagtaagcaccccagagtcactttatgaaatacaaattcaaatggtattttttaaaagtgaattggaatatgcgggaaatttaaacagcagggattcttctatttaatgcctgccccattcagggacacttatattcacatataaacctgctggaatcctttctgaaactctacactctattgacctcagcacaactgagtgaaggggaacgaaagggagagaccatcttcaccctttgtttttgtggaatttatttagaaaaattttattgagagattctaaaaagtataagaaactaacaaatttttaccactgcattcatgttggctttttgagcacatagctctaagtggggggatggcggggatgcctcaaaaggggagaggaaggactctccttggcctgggaataggtgtgcctatgggaaccataggagcaagagtcaagagttcttcagaaaactgcctttaagtcaggacaaaggaacaaaacatttgcaaattaagcaccaaaaagatcaagtaatttacttgccattttcataaacaaaataattagtcccctctctcatcttttctctatcatgtcttttgtataaagacatttctttctgaactgcgtgctgtctagacaaagccacgtcatctgatgagaagcagactttgctcagcaacattgagaaaaaacagatctacttctttccatttcttagcctgtgtcaactgctgaatgctgaaatctaaccccagagcctcactttgccatttcatacagtttgaataaaaaaaaagaaccttagagaaaaagaaaaagctttgactcccccattaaaaagtttattctctaattctataaatatcaagaaggcagatgtgttttattttattttacattaggaagaaaaaaccacaatctcaaagcaagcacccgggttttacttcagtttacaataatttaatgtgcctgagaatttttgtgcaaatacatgtcatctttcattaaaaatatgcatagcgcactttggaaaaagttggtttagttgtcaccaacttttcttacaaaaaaagtttacatatataaatatacaacattccctaattcctattgattgcacttctggcttaaccccttccagcctccaaggaatttttaaaaacatgcaattatgtttgtattccttggctactgtacttattcagacgaaatattctaaaaacaagttttcttggtttcaatttactcacattttgcctcttaaaagtaaatccctcccaccctctacccagttktttttttttttggaggttgtataaaaatacaaatttaaaaaatgaacttttattaatcataaatacaaaataattgagtggtatttgggctcccaggggctcaaaggcctgaaaacagaaaggaaaataggagtctccacctgtgattcaatgaaaaagatgaaactcctaattttgctaatgctgcgagcataccatttgatggatacataatttaaccagatattaacaggggaaacatataagccatctcactattgtctcagtaatagactgagcttaccccaccaacccctcagaacggctttctataagcaataaaactgctccttttctcttcccatccttctaacctgggttctctctgctttatgcttaccagaagtaaatgtgccagcaagttcagtatctctgtatgttttagtattactgaatttatttgtattcactttttatgttcaagacaagaaaactcaactgaaggagtatattaaacctttcttttctccctctgaacactcatggcccattcatttatactttcaatttgcccgacttcctccattagggctcatcccaattttatttccattcctccattccccctttcacattcacaacccttgtgcaacattccttttctctcaagtcagaccagaccacatgtttcagtgcatatctatccttcatgtgctaacttgtataaraggtcagttaactgctgaacctcagtcctccttcaggacacccattttgggtgaggatgtgcaaactggggcagcaaagctacccattatgactggaagactctgattcctccttagtccacctaataaactgctacctgaatttaaataaacagcagaatctggtttttgaggaccaatttctgcctcctggcatcttccattctcttgggcaccagggttcttgaccactctggctatccccagtctcttcagcctgtccactaagttcatcttcaactggccaacatcaggagggttccgggagggtctcaagccatacatctcctggaggaatgtctcagctggtcgagaggccaaaaaattttcagagagatgcactcgaggctcaaagggtaaaggagaagggcaaggtgagtgagatggtgaatttggtggtgtggaagggatagccagggatttagggagaggctggagggggttctctgaaattgggctgtggtacactttggcagagatgcctcgctcttgtagaagtttggccaagctcatggtgctactgaaggttgtagtggaatctcgtcggttggtgatggactcaccaatgctgagtctataggacaaggcaggagaattcacagccgtgttggatgaactctaccgctacttccacaggataatgaagggaacccagagctgggggtaacctgagtgatgtcagagggatgtaatattctacaggtggtgaaagtgaatgttgagtttgtgcacgacaggcactttcctgggttggcggttgcaactgtaactggtccacctgctgaagtaatgggtggcaggaagatccctgttactggcttggatgttgaaagtttctcttccacttcaagaggttgctgaacctgaaaagtaataccctcctcttcatcctcttctaaatctgagatgtgataaatagcatccccgggcaactgggtaaagcctttagtaatgacacctggtcgtggatcaaggatggttcccaagtttggttgagcaagctgctgaggtctgtgatctctgactgggtggtgcagagagaggcaaggctctctgtcggggtgacacagccactaactccttccttctggtctgccagaacctggatcttccgctgccattcttcagcaaag

SEQ ID NO: 1835 - DNA, 1256 bp, Homo sapiens
  misc_feature (396)..(396): n equals a,t,g, or c
  misc_feature (1251)..(1252): n equals a,t,g, or c
atctttggcagctgagattgaggggactatgcgtaaaaagctgagtttggatgaggaatcttctctctttaaacaaaaagcccaacagaagcgggtatttgataccgtcagattgccaatgacacacggggccgctctatctcattcccagctctgttacccattccaggctccaaccgttcaagtgtcatcatgacagcaaaaccttttgagtctggtcttcagcaaacagaggacaaatcactcctgaaccaggggagcagctcagaggaggttgcagggagctcccagaagatgggccaaccaggaccctcaggagatagtgatttggctacagcactgcatcgccttagcttgcgtcgacaaaactatttaagtgagaagcagttctttgcntgaagaatggcagcggaagatccaggttctggcagaccagaaggaaggagttagtggctgtgtcaccccgacagagagccttgcctctytytgcaccacccagtcagagwtcacagacctcagcagtgccagttgccttcgaggttttatgccagaaaaattmcaaattgtcaagccccttgaaggwtcacaaactctgtatcactggcagcagcttgstcaaccaaacttgggaaccatccttgatccacgaccaggtgtcattactaaaggctttacccagttgcccggggatgctatttatcacatctcagatttagaagaggatgaagaggagggtattacttttcaggttcagcaacctcttgaagtggaagagaaactttcaacatccaagccagtaacagggatcttcctgccacccattacttcagcaggtggaccakttacaggtgagaagagtgtctggttgaatatggtataataaccagaagtactttgcattctgacttactagacagtcagctggctacctctgctcactggagggtwcttaatcttgcatatcagataatgaaaatctatagcattagtggcattcctaattctctccactttatcttagccagcctgcgttagtagattgggtagagagctggatgaattcaagtcagtggttcacaaaccttttgggctcagaaactctttatactctaaaaaatcattgagaattccagagagcctatctgtgcaggttatatctattgacatttaatatatcataaatcaaaactgagaaaccataaaaatatgtattaacatcatttaaaataattgtgttacacaaataggttnnatac

SEQ ID NO: 1836 - DNA, 895 bp, Homo sapiens
  misc_feature (13)..(13): n equals a,t,g, or c
  misc_feature (15)..(15): n equals a,t,g, or c
  misc_feature (19)..(19): n equals a,t,g, or c
  misc_feature (29)..(29): n equals a,t,g, or c
gaaacttcccaananttcnggaaataccnaaggctttacccagttgcccggggatgctatttatcacatctcakatttagaagaggatgaagaggagggtattacttttcaggttcagcaacctcttgaagtggaagagaaactttcaacatccaagccagtaacagggatcttcctgccacccattacttcagcaggtggaccagttacaggtgagaagagtgtctggttgaatatggtataataaccagaagtactttgcattctgacttactagacagtcagctggctacctctgctcactggagggtacttaatcttgcatatcagataatgaaaatctatagcattagtggcattcctaattctctccactttatcttagccagcctgcgttagtagattgggtagagagctggatgaattcaagtcagtggktcacaaaccttttgggctcagaaactctttatactctaaaaaatcattgagaattccagagagcctatctgtgcaggttatatctattgacatttaatatatcataaatcaaaactgagaaaccataaaaatatgtattaactcatttaaaataattgtgttacacaaatatgtttaatgaaaaatagctaatttttttacatagtgagaaaaacagttgttcaagtctctaatttttgacttaatacaaaatagctttattctcattatcagcatctgccttcagtctattgcaatatgttgtttcagttgaacaatatgaaggaaatgcagccaggcacaaacatgcagttggaaagagtgttttaatagtcttttcagatatgtgtagctattttttgatattacactaaaactaggtaagtagtagtttcttgaacgtttgtagcaatgtgag

SEQ ID NO: 1837 - DNA, 1171 bp, Homo sapiens
ccgtgacaagcccaaccggacggctggagagggcgagaagggcagacgggacatgcagcctcttccgcctgagccccggaagggtgatgtggctgcggcatcgccggcctcgctatgtctgccattttcaattttcagagtctattgactgtaatcttgctgcttatatgtacctgtgcttatattcgatccttggcacccagcctcctggacagaaataaaactggattgttgggtatattttggaagtgtgccagaattggtgaacggaagagtccttatgttgcagtatgctgtatagtaatggccttcagcatcctcttcatacagtagctggggaaaatgccagaatgtagttgccatcagatttgattgtgaacaaggactgactgcagaaaataatggaaaggatgtttaactcttttatctccgaacattgaatgagataaatttccagatgctgttctctattttaatgttattggaccaatgttctgtataaacaattaagatgtaaccatttaatagtctgtaacaatcaacctcagtactgtcactacaatattacattctgcaaatgttattctgttgtatcagatacaaaattttagtgaggtatctctaaggcacatagtagaaaacaaaattggttaattactcaagttcctttcactgtgatttggaaatgatttaatctttatagaatgagaaccttttttggactagcttttttattaaaatggctcaatttgtgttgataaggattgcattaatatttaatagtgcttgcttttcctctgggcacaccattttgatcattaaccagagtacctctactcttagcaaactctagtttatgacaagtatttaaaatatttaaaacaagcttatgcagttcttaaggacgaaggtaaatgagatgtaacttaaaaatagtattgggaaaatgttgatagttaacattagtggatttagactagccaaatgacatagtaggctctgaaacatcttgtcaagtatatgtattttgtgcatgaatttttgctggaaagctgtctttctctgaaaaacacaacgttcttagaatgaaaagaacaattataaaataattatcctaaaaaaaaaaaaaactgggcggggggcccggtacccaaatcgccggcatatgatc

SEQ ID NO: 1838 - DNA, 940 bp, Homo sapiens
tctaaaggaactaagctgagctccccgcggtggcggcgctctagaactagtggatcccccgggctgcaggaattcggcacgagggctgaagacacaggccaggcggaatgaagatgatggtggtcttgctcatgctgtcctcgctcagccggctcctgggcctcatgaggccatcatctctcaggcaatacctggactctgtgcccttgccaccctgccaggagcaacagccaaaggctagtgccgagctagaccacaaggcctgctacctgtgccacagcttgctgatgctggccggggtagttgttagctgccaggacatcactccagaccagtggggcgagctgcagctgctgtgcatgcagttggaccgccacatcagcacgcagatccgggagagcccccaggccatgcaccgcaccatgctcaaggacctggctacccagacctacatccgttggcaggagctgctgacccactgccagccccaggcccagtatttcagcccctggaaagacatctaaagggacagggtcagggcagcccagggctyctggcttcagcaggaagtgaacaggctcagggaactggaggaagcgaagcatcaaggccagaggaggccacatgctgaccagcctgatgaggcaagagcctgcccctgccaccgccccgacccctctcctctctgcaagagcctgcctctgccaccgccccgaccccctctcctctcagcaagggatgggcctctctgcctcgcccacccctcagccctcctcccagccatctcctcttccctaaggcctctgtctccatagctctggtttccctgggcctcagtcctccccaccctccttcctctgtctccctgtcactaatgtgaggtttctttgtgcacattaaagtcttctttcagcawmaaaaaaaaaaaaaaaactcgagg

SEQ ID NO: 1839 - DNA, 1260 bp, Homo sapiens
ggcacgagggtctttttagcagacgaaaaccactttggtagtgccagtgtgactcatccacaatgatttctccagtgctcatcttgttctcgagttttctctgccatgttgctattgcaggacggacctgtcccaagccagatgatttaccattttccacagtggtcccgttaaaaacattctatgagccaggagaagagattacgtattcctgcaagccgggctatgtgtcccgaggagggatgagaaagtttatctgccctctcacaggactgtggcccatcaacactctgaaatgtacacccagagtatgtccttttgctggaatcttagaaaatggagccgtacgctatacgacttttgaatatcccaacacgatcagtttttcttgtaacactgggttttatctgaatggcgctgattctgccaagtgcactgaggaaggaaaatggagcccggagcttcctgtctgtgctcccatcatctgccctccaccatccatacctacgtttgcaacacttcgtgtttataagccatcagctggaaacaattccctctatcgggacacagcagtttttgaatgtttgccacaacatgcgatgtttggaaatgatacaattacctgcacgacacatggaaattggactaaattaccagaatgcagggaagtaaaatgcccattcccatcaagaccagacaatggatttgtgaactatcctgcaaaaccaacactttattacaaggataaagccacatttggctgccatgatggatattctctggatggcccggaagaaatagaatgtaccaaactgggaaactggtctgccatgccaagttgtaaagcatcttgtaaagtacctgtgaaaaaagccactgtggtgtaccaaggagagagagtaaagattcaggaaaaatttaagaatggaatgctacatggtgataaagtttctttcttctgcaaaaataaggaaaagaagtgtagctatacagaggatgctcagtgtatagatggcactatcgaagtccccaaatgcttcaaggaacacagttctctggctttttggaaaactgatgcatccgatgtaaagccatgctaaggtggttttcagattccacataaaatgtcacacttgtttcttgttcatccaaggaacctaattgaaatttaaaaataaagctactgaatttattgccgcaaaaaaaaaaaaaaaaaaaaaaaaaaaaaaaaaaaaaaaaaaraaarraaaaaaraaargg

SEQ ID NO: 1840 - DNA, 1091 bp, Homo sapiens; identical to SEQ ID NO: 1064
  misc_feature (1066)..(1066): n equals a,t,g, or c
  misc_feature (1080)..(1080): n equals a,t,g, or c

SEQ ID NO: 1841 - DNA, 1120 bp, Homo sapiens
  misc_feature (1080)..(1081): n equals a,t,g, or c
  misc_feature (1087)..(1087): n equals a,t,g, or c
  misc_feature (1120)..(1120): n equals a,t,g, or c
ctgaggtccgcccggaattcccggtcgaccacgcaggtcccgaggagcgcagactgtgtccctgacaatgggaacagccgacagtgatgagatggccccggaggccccacagcacacccacatcgatgtgcacatccaccaggagtctgccctggccaagctcctgctcacctgctgctctgcgctgcggccccgggccacccaggccaggggcagcagccggctgctggtggcctcgtgggtgatgcagatcgtgctggggatcttgagtgcagtcctaggaggatttttctacatccgcgactacaccctcctcgtcacctcgggagctgccatctggacaggggctgtggctgtgctggctggagctgctgccttcatttacgagaaacggggtggtacatactgggccctgctgaggactctgctagcgctggcagctttctccacagccatcgctgccctcaaactttggaatgaagatttccgatatggctactcttattacaacagtgcctgccgcatctccagctcgagtgactggaacactccagcccccactcagagtccagaagaagtcagaaggctacacctatgtacctccttcatggacatgctgaaggccttgttcagaacccttcaggccatgctcttgggtgtctggattctgctgcttctggcatctctgrcccctctgtggctgtactgctggagaatgttcccaaccaaagggaaaagagaccagaaggaaatgttggaagtgagtggaatctagccatgcctctcctgattattagtgcctggtgcttctgcaccgggcgtccctgcatctgactgctggaagaagaaccagactgaggaaaagaggctcttcaacagccccagttatcctggccccatgaccgtggccacagccctgctccagcagcacttgcccattccttacaccccttccccatcctgctccgcttcatgtcccctcctgagtagtcatgtgataataaactctcatgttattgttaaaaaaaaaaaaaaaaaaaaaaaaaaaatttgggggggggccggtacccattgggcctnngggggnggtttaaaattaatggggggggtttaaaagggn

SEQ ID NO: 1842 - DNA, 502 bp, Homo sapiens; identical to SEQ ID NO: 854

SEQ ID NO: 1843 - DNA, 2044 bp, Homo sapiens
  misc_feature (2023)..(2025): n equals a,t,g, or c
gccgcctctgttcaggacactgggtccccttggagcctccccaggcttaatgattgtccagaaggcggctataaagggagcctgggaggctgggtggaggagggagcagaaaaaacccaactcagcagatctgggaactgtgagagcggcaagcaggaactgtggtcagaggctgtgcgtcttggctggtagggcctgctcttttctaccatggcagcccagggctatggctattatcgcactgtgatcttctcctttgtcatgccatcattggtggaagagatccctttggacaaggatgatttggggttcatcaccagcagccagtcggcagcttatgctatcagcaagtttgtcagtggggtgctgtctgaccagatgagtgctcgctggctcttctcttctgggctgctcctggttggcctggtcaacatattctttgcctggagctccacagtacctgtctttgctgccctctggttccttaatggcctggcccaggggctgggctggcccccatgtgggaaggtcctgcggaagtggtttgagccatctcagtttggcacttggtgggccatcctgtcaaccagcatgaacctggctggagggctgggccctatcctggcaaccatccttgcccagagctacagctggcgcagcacgctggccctatctggggcactgtgtgtggttgtctccttcctctgtctcctgctcatccacaatgaacctgctgatgttggactccgcaacctggaccccatgccctctgagggcaagaagggctccttgaaggaggagagcaccctgcaggagctgctgctgtccccttacctgtgggtgctctccactggttaccttgtggtgtttggagtaaagacctgctgtactgactggggccagttcttccttatccaggagaaaggacagtcagcccttgtaggtagctcctacatgagtgccctggaagttgggggccttgtaggcagcatcgcagctggctacctgtcagaccgggccatggcaaaggcgggactgtccaactacgggaaccctcgccatggcctgttgctgttcatgatggctggcatgacagtgtccatgtacctcttccgggtaacagtgaccagtgactcccccaagctctggatcctggtattgggagctgtatttggtttctcctcgtatggccccattgccctgtttggagtcatagccaacgagagtgcccctcccaacttgtgtggcacctcccacgccattgtgggactcatggccaatgtgggcggctttctggctgggctgcccttcagcaccattgccaagcactacagttggagcacagccttctgggtggctgaagtgatttgtgcggccagcacggctgccttcttcctcctacgaaacatccgcaccaagatgggccgagtgtccaagaaggctgagtgaagagagtccaggttccggagcaccatcccacggtggccttccccctgcacgctctgcggggagaaaaggaggggcctgcctggctagccctgaacctttcactttccatttctgcgccttttctstcacccgggtggcgctggaagttatcagtggctagtgaggtcccagctccctgatcctatgctctatttaaaagataacctttggccttagactccgttagctcctatttcctgccttcagacaaacaggaaacttctgcagtcaggaaggctcctgtacccttcttcttttcctaggccctgtcctgcccgcatcctaccccatccccacctgaagtgaggctatccctgcagctgcagggcactaatgacccttgacttctgctgggtcctaagtcctctcagcagtgggtgactgctgttgccaatacctcagactccagggaaagagaggaggccatcattctcactgtaccactaggcgcagttggatataggtgggaagaaaaggtgacttgttatagaagattaaaactagatttgatactgaaaaaaaaaaaaaaaaaaannnaagggsggcccggacccaa

SEQ ID NO: 1844 - DNA, 2138 bp, Homo sapiens
ggcgacggaccctttccagctttttgcmtgaaagcwttgcaggaaatggcgaaaagtcttttgaagacagcctctctgtctggaaggacaaaattgctacatcaaacaggattgtcactttatagtacatcccatggattttatgaggaagaagtgaaaaaaacacttcagcagtttcctggtggatccattgaccttcagaaggaagacaatggcattggcattcttactctgaacaatccaagtagaatgaatgccttttcaggtgttatgatgctacaacttctggaaaaagtaattgaattggaaaattggacagaggggaaaggcctcattgtccgtggggcaaaaaatactttctcttcaggatctgatctgaatgctgtgaaatcactaggaactccagaggatggaatggccgtatgcatgttcatgcaaaacaccttaacaagatttatgagacttcctttaataagtgttgcgctggttcaaggttgggcattgggtggaggagcagaatttactacagcatgtgatttcaggttaatgactccagagagtaagatcagattcgtccacaaagagatgggcataataccaagctggggtggcaccacccggctagttgaaataatcggaagtagacaagctctcaaagtgttgagtggggcccttaaactggattcaaaaaatgctctaaacataggaatggttgaagaggtcttgcagtcttcagatgaaactaaatctctagaagaggcacaagaatggctaaagcaattcatccaagggccaccggaagtaattagagctttgaaaaaatctgtttgttcaggcagagagctatatttggaggaagcattacagaacgaaagagatcttttaggaacagtttggggtgggcctgcaaatttagaggctattgctaagaaaggaaaatttaataaataattggtttttcgtgtggatgtactccaagtaaagctccagtgactaatatgtataaatgttaaatgatattaaatatgaacatcagaattactttgaaggctactattaatatgcagacttacttttaatcatttgaatatctgaactcatttacctcatttcttgccaattactcacttgggtatttactgcgtaatctggaacatttagctaaaatatacacttttggcttaaaaattattgctgtcaattccaataataattcttagcttataaccaaagagcagtgtttaaaaggagagcttctatacaaaacctattcctggcgttacttttcatacaatttttgttctgttttacctggaaataatttaccaaaataactgagtgttgctgctaaagaacaaaagtggggaggtatcagggaacaagaaaacaagaaagggtatgatcaatcattttcttctgctccaaacagctggagtaaaattcatgggaaatggcccttcatttaaaaaaagatgtacctcactacccactacaaatttggaactttgttcttttcaataattagttttctattgtaaattacctactaaacagtggtagccatgacatggaaagtcaactgattctacaattggacattcatttgtgtgccctggaatttccaactagtaataaacaactactgttgatgtagttttaaaccacttgaagggactcatgaagcatcctgcaacataaatttgcatttttacatcagatttcttttttttcctgaaaaacaactaaccttctaacaactatctttcaaaagtaaatgtaataaaaatgcacaacataaaatgtttatgatcccagcaatacactttttaaaaaatgtgaaagtcaaagaattaagttctagttctgactcatcacaagaggtcaaaagtatttgctactgtaacattcaattcacatttgagaatcatggtaaaaataacttgtatttgccttaccatcatgatcctactgttgagttaggaaaatatggttagacagactcacattactttttttcagaggtaaactctagattactgtgtcaacccaatactatttggccatagatgtaaaaactaccaaataaaagtggattttgtggtctacaaaaaaaaaaaaaaaaaaaaaaaaaaaaaaaa

SEQ ID NO: 1845 - DNA, 895 bp, Homo sapiens
  misc_feature (28)..(28): n equals a,t,g, or c
ggtgggattcccccccgggggcttgccngggattttcgggccccgaggttctagctactctgttctatataggctacacttgcaaatcaaattcctctgtcaatgaccttcaatgctatctctaagaaattcctccaggagtctgtctgtcccatgctagaagcctcagaactgtgcctctgtgtttttatcctggacacaatctgcctagaaggtcttccccaaactcgtgtcagctgaattcatacctggtatctctctcccccagcttagtgtaaacttagtgcagggactttatcttgcctcaccaatgtcttcgccacccaagaataatgcttggcacacaagagggggccaatacatttttatgaaatgaatgtagacttaggatatgtgtctgttttttgatatgtttcctgagtggtcagtgttcttccccaggattccctgactccaaaccagccctctgttagggacaaactgcccaagaaaccttcttggtgctgtccacccatcccccaagcctctttacatttctaagcccttacctaggcaccacggtgaagccagcagactttgcttatcagaccttgctgcaataagcaaaccccaattacaaaccacccacactgcacagggggaggtcatgggaaacataaacaaactttacctacaccctcctgtaataaacgtcacaaggtaatatgtagcaaaattaaccagcaaacaaccccaggatgcggccatacgaaagaactccatcaaactcccctccccaatataaacccctcattctgtaagcttggggctacttcctctctgactgttaagggagcagccagcaggttaataaaaagttacctgcctaaaaaaaaaaaaaaaaaaaactcgaggg

SEQ ID NO: 1846 - DNA, 2151 bp, Homo sapiens
aaaggcacgcaaaacggaaaagcgtgtgtaggggagcggaaaaggaagtcaccaccgtggcctgcgacgaaatggcgaaaagtcttttgaagacagcctctctgtctggaaggacaaaattgctacatcaaacaggattgtcactttatagtacatcccatggattttatgaggaagaagtgaaaaaaacacttcagcagtttcctggtggatccattgaccttcagaaggaagacaatggcattggcattcttactctgaacaatccaagtagaatgaatgccttttcaggtgttatgatgctacaacttctggaaaaagtaattgaattggaaaattggacagaggggaaaggcctcattgtccgtggggcaaaaaatactttctcttcaggatctgatctgaatgctgtgaaatcactaggaactccagaggatggaatggccgtatgcatgttcatgcaaaacaccttaacaagatttatgagacttcctttaataagtgttgcgctggttcaaggttgggcattgggtggaggagcagaatttactacagcatgtgatttcaggttaatgactccagagagtaagatcagattcgtccacaaagagatgggcataataccaagctggggtggcaccacccggctagttgaaataatcggaagtagacaagctctcaaagtgttgagtggggcccttaaactgggattcaaaaaatgctctaaacataggaatggttgaagaggtcttgcagtcttcagatgaaactaaatctctagaagaggcacaagaatggctaaagcaattcatccaagggccaccggaagtaattagagctttgaaaaaatctgtttgttcaggcagagagctatatttggaggaagcattacagaacgaaagagatcttttaggaacagtttggggtgggcctgcaaatttagaggctattgctaagaaaggaaaatttaataaataattggtttttcgtgtggatgtactccaagtaaagctccagtgactaatatgtataaatgttaaatgatattaaatatgaacatcagaattactttgaaggctactattaatatgcagacttacttttaatcatttgaatatctgaactcatttacctcatttcttgccaattactcacttgggtatttactgcgtaatctggaacatttagctaaaatatacacttttggcttaaaaattattgctgtcaattccaataataattcttagcttataaccaaagagcagtgtttaaaaggagagcttctatacaaaacctattcctggcgttacttttcatacaatttttgttctgttttacctggaaataatttaccaaaataactgagtgttgctgctaaagaacaaaagtggggaggtatcagggaacaagaaaacaagaaagggtatgatcaatcattttcttctgctccaaacagctggagtaaaattcatgggaaatggcccttcatttaaaaaaagatgtacctcactacccactacaaatttggaactttgttcttttcaataattagttttctattgtaaattacctactaaacagtggtagccatgacatggaaagtcaactgattctacaattggacattcatttgtgtgccctggaatttccaactagtaataaacaactactgttgatgtagttttaaaccacttgaagggactcatgaagcatcctgcaacataaatttgcatttttacatcagatttcttttttttcctgaaaaacaactaaccttctaacaactatctttcaaaagtaaatgtaataaaaatgcacaacataaaatgtttatgatcccagcaatacactttttaaaaaatgtgaaagtcaaagaattaagttctagttctgactcatcacaagaggtcaaaagtatttgctactgtaacattcaattcacatttgagaatcatggtaaaaataacttgtatttgccttaccatcatgatcctactgttgagttaggaaaatatggttagacagactcacattactttttttcagaggtaaactctagattactgtgtcaacccaatactatttggccatagatgtaaaaactaccaaataaaagtggattttgtggtctacaaaaaaaaaaaaaaaaaa

SEQ ID NO: 1847 - DNA, 1560 bp, Homo sapiens
ggcacgagcccaagggaaaagtgaaccagctcttcagaggaggagagcatcttaaacagacgagatggatgagctggctcttggcttgcaggctaatcttgctgatctctctcttaggaaaaacagacgacgcaaaggtgtctgagaaaggaaggctttctcctaaagcctcccaggtgaagcgctccccatcagatgcaggccggagcagtggtgacgaatccaaaaagcccctccccagcagctctaggacacctactgccaatgccaacagctttgggttcaagaagcagagtggttccgccgccggcctggccatgatcacagccagcggggtgactgtcaccagcaggtcagccacactgggcaaaatcccaaagtcatctgcactcgtcagtcggtctgctggtcggaagtcaagtatggatggggctcagaatcaggatgacgggtatctagccctaagctcccggacaaaccttcagtaccggagtttgccgaggcccagtaagtccaacagccggaacggggctgggaacaggtctagcaccagcagcatagattccaacattagcagcaagtccgcaggcctgccagtgcccaaactgagggagccttccaaaacagccctaggcagctctctaccaggtctggtcaaccaaacagacaaggagaaaggcatctcatcagacaacgagagtgtggcttcctgtaactcggtgaaagtgaatccggcagcccagcctgtgtccagtccggctcagaccagtctccagcctggagccaagtacccagatgtggcctctcccacactccgcaggtaagtgagtacataaatggtgcagagcagaaccagaatacagggaatggatttagtaatttcctgtttcttagttgaagcaccctctgtttttctccactttagtcctccagtaaagctgttttgtcagatcaggccggcagttttgcagttgactattttcccatgttgggatgaaaaacttaggcctctggaatcaatcatcttagaatcaaatcttaggtccattttaattagctgccatataaccttttttaacaattctgccttagtttcctcacctgtaaaatggggatgaagatacttttttgtcagggtttttgtaaagatacatctttgtagctgtgtctggtcgtagtatgcactcaatagaagttagctactgctgggcaccgtgctcacgcctgtaatcccagcactttgggaggccaaggcgggcagatcacgaggtcaggagttcgagaccagcctggccaatatggtgaaaccccgtctctactaaaaatacaaaaaaattagcctggcatggtggtatgcacctgagtcccagctactcaggaagctgaggcagaagaatcacttgaacccaggaggcggaggttgcagtgagccaagatcacaccactgcactccagcctgggcaacagagcgagactccatctcaaaaaaaaaaaaaaaaaaaaaagcaatcaaataataaatctattctgctaagagatcaaaaaaaaaaaaaaaaaaaa

SEQ ID NO: 1848 - DNA, 1165 bp, Homo sapiens
  misc_feature (439)..(439): n equals a,t,g, or c
  misc_feature (1121)..(1121): n equals a,t,g, or c
  misc_feature (1126)..(1126): n equals a,t,g, or c
  misc_feature (1138)..(1138): n equals a,t,g, or c
ggaaaaggcaagtcactctgtatgtccctttccatctgacacactcacaggggcctgggatgctagtgtgtgcccattggttggcttctgccaggaattggagcctgggtgtgctaggtgcagagtctcctgatatcgcagagagcccctgttctcaatggaagtgcaacagagtagagtctagacagagtattagaaactttcaggataataatcatgataatagccagtggtttttgaatgctttttctgttctgggtagtgttctcagtgcttatatgcattatctcatttaactttcctatcaaccctatgatgaggcactgtgattatctgcattttatagtgaggtggctgagacacagagacgctaagtaacttgcccaaggtcacatatctgactagtagtaaagctgggttctgggcttgtttttacttncaagaattgagtcaaatgtagtcccacttcattaagctgctgggatgggaggagcaggaggggcagggcctggatgggtgaagcagccaagaggctcctatgtaacttcctatgaagaggtagttgtctccaaacatgtggaaacaaattgagaatgttctgcttgtattcaagctgaaagacattttcattcttattgggtttgcatcaaattctcattttgctagtcttatacattagagtatcaaccaatggtcccatgtagctttaacaaatgatctaataaattgagagaagcattggccagagaaagttggagtgcttggaacaggccttggctggctgtccagctccacctgggggaracgggaggtgtgagctggcactaagaggccctctgcctgtctaacttggaccagggttgcttggggctaaaagagagcccaaaatgttcatagcagcattattcacaatagtcaaaagtggaaagaactcaagcatccaccaatcaatgagtaaatgaaatgtggtgtatctatacaatggaatattattcagccataaaaaggtgaagtgttgacctatrctactacattgatgaacctgaaaacattatgctaaggggaaaaagccagatgcaaaggccacatattgtgagattctgttttggtgaaatgtccanaatangcaagtccatanaaagtgaaagcagatttatggtttcta

SEQ ID NO: 1849 - DNA, 601 bp, Homo sapiens
  misc_feature (542)..(542): n equals a,t,g, or c
  misc_feature (586)..(586): n equals a,t,g, or c
  misc_feature (595)..(595): n equals a,t,g, or c
tacgaggtcgacggtatcgataagcttgatatcgaattcggcacgaggctcactgcaagctctgcctcctgggttcacgccattctcctgcctcagcctcccgagtagctctgggactacaggcacctgccaacacgcccggctaattttttgtatttttagtagaggcggggtttcaccatgttagccaggatggtctcgatctcctgatcttgtgatccgcccgtctccgcccctcaaagtgctgggattacaggtgtgagccaccgcgtccggccaagacggtgttttgctctgggtcttaatagtgtggactttgtgttctcttttttgttgctgttgttctggtttttgtttgwwtgcctgtwwttattgagatgtaattcatatacctcatataccataatattcaccctttaaagtgtagaattcagtagttttttgkatatacacaaagttgtgcaatcatcatcactatctaatttcagaacatttcaacaccccaaaaagaccctccataccaattagtagtcactccagantccccgccaccttccagctcctagaaaccataaatctggctttnactttctanggactt

SEQ ID NO: 1850 - DNA, 940 bp, Homo sapiens
  misc_feature (39)..(39): n equals a,t,g, or c
  misc_feature (79)..(79): n equals a,t,g, or c
  misc_feature (93)..(93): n equals a,t,g, or c
  misc_feature (400)..(400): n equals a,t,g, or c
atatatttatatacttgattaaaatgtatatattgaatnaaaatttgctagcaaacacatttgtttttgtttttgtttngtttttctgttganacagggtttcgctctgtcgcccaggctggactgcagtggggcgatctcggctcactgcaagctccgcctcccgggttcacgccattctcctgcctcagcctcctgagtagctgggactacaggcgccggccaacacgccctgctaattttttgtattttaagtagagacggggtttcaccgtgttagccaggatggtctcgatctcctgaccttgtgatccacccatctgggcgtgccaaagcgctgccattacaggcwtgarccactgcgcccgaccatatatttgtttttataaaaagtttctcncaccataaatagagtgaacaacatggctacttgtwagctccaggcagamacttcttctccctcttcccamctccytgsamtttttcccatgcctcgcacatggattaacccaaggctgttttcccctacagcccagggaaatccaggccagtctcctgcagttcccctcctcagaatccagaaataatcagagctgagccagctgagtggagcattaggaagcagagcaatatgaaaaaaggccagagttgctctccaggtagccagcatttagggctgctcacacactctcaagagatagaactgcatttatcacaaaccccaggggagtgctatgtggggctggaagcaaatgaggtggctctttttctgtcacttaagagtgatcacctttgagatctctttcaactgtgatcatctacaatcttctgagccattggcatgacaaagattctcttccagaccaaaccctagtcaggctcctctgagctcttctcgtgccgaattcgatatcaagcttatcgataccgtcgacctcga

SEQ ID NO: 1851 - DNA, 1177 bp, Homo sapiens
ggcacgagttgctcgttacctgggtgatgggatcatccgtatcccaaacctcagcatcatgcaatatacccatgtaacaaacttacacatgtacatgctaaatccaaaataaaagttgaaattatttttttcaaaaggtgagttaaaatgagttaaggattaatcaccactggaaaaggtttgttatatttactatttttactacatattatttactatttattattccctatatcctccatatatttatatacttgattaaaatgtatatattgaattgaaaatttgctagcaaacacattgtttttgtttttgttttgttttttctgttgagacagggtttcgctctgtcgcccaggctggactgcagtggggcgatctcggctcactgcaagctccgcctcccgggttcacgccattctcctgcctcagcctcctgagtagctgggactacaggcgccggccaacacgccctgctaattttttgtattttaagtagagacggggtttcaccgtgttagccaggatggtctcgatctcctgaccttgtgatccacccatctgggcgtgccaaagcgctgccattacaggcatgagccactgcgcccgaccatatatttgtttttataaaaagtttctccaccataaatagagtgaacaacatggctacttgtaagctccaggcagacacttcttctccctcttcccacctccttgcactttttcccatgcctcgcacatggattaacccaaggctgttttcccctacaggcccagggaaatccaggccagtctcctgcagttcccctcctcagaatccagaaataatcagagctgagccagctgagtggagcattaggaagcagagcaatatgaaaaaaggccagagttgctctccaggtagccagcatttagggctgctcacacactctcaagagatagaactgcatttatcacaaaccccaggggagtgctatgtggggctggaagcaaatgaggtggctctttttctgtcacttaagagtgatcacctttgagatctctttcaactgtgatcatctacaatcttctgagccattggcatgacaaagattctcttccagaccaaaccctagtcaggctcctctgagctcttctcgtgccgaattcgatatcaagcttatcgataccgtcgacc

SEQ ID NO: 1852 - DNA, 1614 bp, Homo sapiens
  misc_feature (1)..(1): n equals a,t,g, or c
  misc_feature (1609)..(1609): n equals a,t,g, or c
ntcgctgggatttgtcgtcaccgcgcaaatgccgcaggtaggcactaaatttggtcgttggctggatctgacatttatgcagttgcaactcgacgagcgcactgaaccggacgcgattggatgaatcagtcgctcacccttgcttttttgattgccgccggaattggtctggttgtccagaacacgctgatggtgcgcatcacccagacctcctctaccattctcatcgccatgttgctgaactcactggtggggattgtgctctttgtttctattttatggtttaaacaaggcatggcggggtttggcgaactggtgtccagcgtgcgctggtggacacttatacctggcttgctgggatcgttttttgtcttcgccagtatcagcggatatcagaatgtgggagcggcgacaactattgctgtactggtcgccagtcagctgattggcggtctgatgctggatatcttccgcaktcatggcgtaccactacgggcgttgttcggcccaatttgtggcgcaatttwacttgtggttggcgcytggttggtagccagacgctcattttaatcagaggatggtgccgcctttggttaactgttcgtggcgcgcttccatatcttctttatgcttgcgaccgtgatgggcgatcgctgtgcgcagacgttgctgctgggtgtagcgatcttcccgacttaactccgcgtcatcgctcagggcgattaataattcgttcatatgggcaatgacgctctcttcaatcgcggcatccacgcgcgcgatgacttcatccagatgcgacatactttctccttagccacttgtgaaatttatcgattcatccaaatgatataagtctgcgtggtgccgtcaagccagtgagtaagatttaaaacagtgaaaacaacagcgccaccgggaaactcatcggccatgttgcccccaccagaaaggcgcttaagaaacggatgcgtttcttatcgtgagaaagaaaccaggtgataagaaatgcgattgctgccataaccgcataaaaaacaagcatgtgttgatagagagacatgtacgggcgtccagccagatgaataaaacgcgcgcaaatatgcgtcattttttgacgtgcatcaagttttttcaccagtttgagaaaaaatcatcaaacagcaacttgcccttatccatcttcagaatgagtattattgcggattttcttaacccgtactatacacataggggcaatgataaaaggtggcaaaaatgaatgtttccagtagaactgtagtactgataaatttctttgctgctgttggtttgtttactcttatctctatgagatttggctggtttatttgatgtagtgattttgcacgcagcacgtactgtcagagaaatcagtgctctgacagtacgmaagatcatctcatactcttacgatctgcaatattatccttaatgtttaaccatgacgtggcggacgacggtgtaatcctccagcccataaagtgacatatccttgccgtaaccagaaagtttctgcccaccgtgcggcatttcacttaccagcatgaaatgggtattgacccaggtacaaccatattgcagccgytgntgacg

SEQ ID NO: 1853 - DNA, 1873 bp, Homo sapiens
ttttttttttttttttttttttttcagtttactsatgtattagctctgctatagtaacaaccaacccctaaatctcactgcttactacagcaaacattgctctctcattgctgtgacactcagtggctrcaggccagctgctgtagctcggctccatggaacggctcctctgtgggaaatgtgttctcacagcagagggaagagcacaggccaaccacacatgactcttcaggcttctgtcagacgcaggacagctcatgcctgtgcatatccctctgcattgggagcagggaagtacactctcccrgggggatggggtgggggcactgcaagaagtcacacagctacaagtcaggatggataaactcctcttaggaatggggcaacaaacagctgcagacaaaaatatactctgtaacaacccaacatgctagaagattttccagtttaaaagacacaaaatcctaaatgtcaaaactgcagaggaactcaagaggccactgtccaaagtctgtcacagtcctccatatggcaaagatgaagaaaattggcaatctttttaggggtaccaaggatctsagtttgtacggtctttataaatgcagagcaagatgtggctttcctgcccccatttcacctcaaggcatcttcagcaaccccacatggcttccctctgtgcgcatgaaataacttgaggccagggtctctcagctttaaagccttggaatcctatgcattgtttgtttgtgtgtagatgtgcagtttgaggggtagcttctctaaggtgtcaaactccacaaaagttcagaatcatgtcactggatcctgagtccatctccacagaccagggtgccgctcaggtcagttgctgtggtaactgcagcagatggtcccttwagcgatggagtccaaggacatcatggycaagaccagagtttttatcaactgaggaaagtgaagaccagccagagaggctgcagtttagggaagccagaggctcctcccccaccacgatgccaggaaggactatccccagggtgacggaaagaaagcactggactccagcagtatgtccagctgattcaggtgtgctaggttcccagcagaggagggtaagggaggagatccaggggccctggcttagtcatcgtatctggtacacctttctcccccggagaaaattcttgcaaaaaggagaggatcctacacagaccaaaaatgctggtgtcagggcttttacaaagtacctctggtgctgtagaacctgtagcaaggtgctcttggcaggcacccggtatagttctgccctgtcctcatcctcaaagtagacctccaaattatcagggcaatatttttgctctaggtcccaagagggtgtttcaccaaacatcaccattagatgatcaataaacctggagtcctcatgaaaagcagagatgaagtccgactgggcatactctgggtacagaaagagcacaggccagctcagcctgccctggccatctagactcagcctggctccatgggggttctcagtgctgagtccatccaggaaaagctcacctagaccttctgaggctgaatcttcatcctcacaggcagcttctgagagcctgatattcctagccttgatggcctggagtaaagcctcattctgattcctctccttcttttctttcaagttggctttcctcacatccctctgttcaattcgcttcagcttgtctgctttagccctcatttccagaagcttcttctctttggcatctatttgcagtccctcatcacaccagttcacggcctcggcaaagtgtttcagttccagatggcataaggcacctcttattattgctttgaggtggcagggttttag

SEQ ID NO: 1854 - DNA, 703 bp, Homo sapiens
  misc_feature (13)..(13): n equals a,t,g, or c
  misc_feature (26)..(26): n equals a,t,g, or c
  misc_feature (61)..(61): n equals a,t,g, or c
  misc_feature (74)..(74): n equals a,t,g, or c
  misc_feature (655)..(655): n equals a,t,g, or c
tcacttaaggggnacaaaagctgggngtccaaccccggtggcggcccgtttaaaacttagnggaacccccgggnttgcaggatcggcacgaggttccatgttctgcatgtagtctgtcagagacttgatcttggcttcgtgctgggagatgagcagctggcaggctgccagctcccgctcgctggcattcatcttcctgttggagtccatctgggcgctctcgagctgtttgctgcggttcaccagggacttgacctctgacttcatcttgctgatgtacaggcgggccatggtaaactcctcctcaatgactccattcacatctgccaaagttttcacatcattggtgccaataattccacctatctcccccagatctttcaacagcaaattcaggatctcagttgcccttttcttctggtggttgctaagctcttgtagctggctcagctctctctgtgtggttgtcaatgtagtcgttttctgggccagctcgtctgtcagctgctcattggcccgggtcttatcctccacttcctgtgatttctggtcataattgacagccagctcctccagggcctggagaacttctttcacctcatccttggctgcctcattttcaatctggagacgtgtcagctcctcctgtatcttntctcgtgccgaattcgatatcaagcttatcgataccgtcgacctcgag

SEQ ID NO: 1855 - DNA, 1556 bp, Homo sapiens
tgatacccaagttcgaaattaaccctactaaagggaacaaaagctggagctccaccgcggtggcggccgctctagaactagtggatcccccgggctgccctctccagcctgaattcaggtctgtactgcaccggacgtattctgcgctcaatggcgatgggcggttccgcaccgagttttatggcgaaaatgagtcgtcagcatgtgccgtatgccgggattctggcgacactagttgtgtatgtcgtcggcgtattcctcaactatctggtgccgtcgcgcgtatttgagattgtgttgaacttcgcgtcgctgggaatcatcgcttcatgggcgtttatcatcgtgtgccagatgcgcctgcgtaaagcgattaaagaaggcaaagcagcggatgtcagttttaaactgcctggcgcgcccttcacttcctggctgacattactgtttttactgagtgtccttgtgctgatggcgttcgattacccgaacgggacttatactatcgcggcgctgccgattatcggtattttgctggttataggctggtttggtgtgcgcaaacgcgttgctgaaattcacagcactgcgccagtcgtcgaggaagatgaagaaaaacaggaaattgtgtttaagcctgaaacggcgagttaattgcaaaattgcccggctacgtgccgggcaaattcagattactgacgaaagtgccggatacgccgtgataaaaggcaggcaagtctcaccgttttcaccctcgccatatctattacagcgcaatacgaatcacatcgtctggctgggtagcttcctgctgtttagtggatttttgtttcacactgacatacagcgttttgccatcggcagacagcgccaggctgtttggatgagtcggcgtatcgaacgttttcaccactttatagcttttcgcgtcaatcacactgactttacctgcctgacgatgcgttacgtaggcttcattacgcgcggggwtaaacagcacagccagtgattccggtgccgcaaccttcgccagaatattgccattacgggtatcgaccactaacacttctgcggctttagaatcggtgataaatgcacgctgcctggcggtatcaaggctaatgttgataaagaagtgctctttgccgtcatccagcagctttttacggctgaggattttattgtcggcggtgtcgatggtaatcaattcgccgtcagcgttagtggtgtaaagacgctggaaggaaaaggcgttaacgcaacgaggcctactggtgcaggcaggtgatcagagcgagcaaatttttacccgctggcgtgctggggcgtataacgcctggtcgttgcctgggcgctgttttatcgttctggaggagttgcgctggggggcatttggcgatgcctgccgtctgggaagcccgcaagcggtggcgttgttgctgggtgatttgctcgagaaagcgacacaacatctggcagagagtatcaatgcggcaccgaccacgcgtcactattaccatcagtggtttgcctcttcgatccttccgacgggcggg

SEQ ID NO: 1856 - DNA, 999 bp, Homo sapiens
  misc_feature (523)..(523): n equals a,t,g, or c
  misc_feature (981)..(981): n equals a,t,g, or c
  misc_feature (985)..(985): n equals a,t,g, or c
  misc_feature (992)..(992): n equals a,t,g, or c
aaaatatcggttcatcaaagggagtcgtcatgcatttacgtcatctgttttcatcgcgcctgcgtggttcattactgttaggttcattgcttgttgtttcatcattcagtacgcaggccgcagaagaaatgctgcgtaaagcggtaggtaaaggtgcctacgaaatggcttatagccagcaagaaaacgcgctgtggctcgccacttcgcaaagccgcaaactggataaaggtggcgtggtttatcgtcttgatccggtcactctggaagtgacgcagcgatccataacgatctcaaagccgtttggtgccaccatcaataacacgactcagacgttgtggtttggtaacaccgtaaacagcgcggtcacggcgatagatgccaaaacgggcgaagtgaaaggccgtctggtgctggatgatcgtaagcgcacggaagargtgcgcccgytgcaaccgcgtgagctggtagctgacgatgccacgaacaccgtttacatcagtggtattggtaaagagagcgngatttgggtcgttgatggcgggaatatcaaactgaaaaccgccatccagaacaccggtaaaatgagtaccggtctggcgctggatagcgaaggcaaacgtctttacaccactaacgctgacggcgaattgattaccatcgacaccgscgacaataaaatcctcagccgtaaaaagctgctggatgacggcaaagagcacttctttatcaacattagccttgataccgccaggcagcgtgcatttatcaccgattctaaagccgcagaagtgttagtggtcgatacccgtaatggcaatattctggcgaaggttgcggcaccggaatcactggctgtgctgtttaaccccgcgcgtaatgaagcctacgtaacgcatcgtcagacaggtaaagtcagtgtgattgacgcgaaaagctataaagtggtgaaaacgttmmatamccaaatcggcaataccntagnctacacnggggcaa

SEQ ID NO: 1857 - DNA, 848 bp, Homo sapiens
gcgctgggccggtgggcgggggccggcaggtgctccgcagccgtctgtgccacccagagccggcgggccgctaggtccccggagaccctgctatggtgcgtgcgggcgccgtgggggctcatctccccgcgtccggcttggatatcttcggggacctgaagaagatgaacaagcgccagctctattaccaggttttaaacttcgccatgatcgtgtcttctgcactcatgatatggaaaggcttgatcgtgctcacaggcagtgagagccccatcgtggtggtgctgagtggcagtatggagccggcctttcacagaggagacctcctgttcctcacaaatttccgggaagacccaatcagagctggtgaaatagttgtttttaaagttgaaggacgagacattccaatagttcacagagtaatcaaagttcatgaaaaagataatggagacatcaaatttctgactaaaggagataataatgaagttgatgatagaggcttgtacaaagaaggccagaactggctggaaaagaaggacgtggtgggaagagcaagagggtttttaccatatgttggtatggtcaccataataatgaatgactatccaaaattcaagtatgctcttttggctgtaatgggtgcatatgtgttactaaaacgtgaatcctaaaatgagaagcagttcctgggaccagattgaaatgaattctgttgaaaaagagaaaaactaatatatttgagatgttccattttctgtataaaagggaacagtgtggagatgtttttgtcttgtccaaataaaagattcaccagtaaaaaaaaaaaaaaaaaaaaaaaaaaaaaaaaa

SEQ ID NO: 1858 - DNA, 3600 bp, Homo sapiens
cggacgcgtgggcggacgcgtgggcctcttcctcctcctcaagggaaagctgcccacttctagctgccctgccatcccctttaaagggcgacttgctcagcgccaaaccgcggctccagccctctccagcctccggctcagcggctcatcagtcggtccgcgccttgcagctcctccagagggacgcgccccgagatggagagcaaagccctgctcgtgctgactctggccgtgtggctccagagtctgaccgcctcccgcggaggggtggccgccgccgaccaaagaagagattttatcgacatcgaaagtaaatttgccctaaggacccctgaagacacagctgaggacacttgccacctcattcccggagtagcagagtccgtggctacctgtcatttcaatcacagcagcaaaaccttcatggtgatccatggctggacggtaacaggaatgtatgagagttgggtgccaaaacttgtggccgccctgtacaagagagaaccagactccaatgtcattgtggtggactggctgtcacgggctcaggagcattacccagtgtccgcgggctacaccaaactggtgggacaggatgtggcccggtttatcaactggatggaggaggagtttaactaccctctggacaatgtccatctcttgggatacagccttggagcccatgctgctggcattgcaggaagtctgaccaataagaaagtcaacagaattactggcctcgatccagctggacctaactttgagtatgcagaagccccgagtcgtctttctcctgatgatgcagattttgtagacgtcttacacacattcaccagagggtcccctggtcgaagcattggaatccagaaaccagttgggcatgttgacatttacccgaatggaggtacttttcagccaggatgtaacattggagaagctatccgcgtgattgcagagagaggacttggagatgtggaccagctagtgaagtgctcccacgagcgctccattcatctcttcatcgactctctgttgaatgaagaaaatccaagtaaggcctacaggtgcagttccaaggaagcctttgagaaagggctctgcttgagttgtagaaagaaccgctgcaacaatctgggctatgagatcaataaagtcagagccaaaagaagcagcaaaatgtacctgaagactcgttctcagatgccctacaaagtcttccattaccaagtaaagattcatttttctgggactgagagtgaaacccataccaatcaggcctttgagatttctctgtatggcaccgtggccgagagtgagaacatcccattcactctgcctgaagtttccacaaataagacctactccttcctaatttacacagaggtagatattggagaactactcatgttgaagctcaaatggaagagtgattcatactttagctggtcagactggtggagcagtcccggcttcgccattcagaagatcagagtaaaagcaggagagactcagaaaaaggtgatcttctgttctagggagaaagtgtctcatttgcagaaaggaaaggcacctgcggtatttgtgaaatgccatgacaagtctctgaataagaagtcaggctgaaactgggcgaatctacagaacaaagaacggcatgtgaattctgtgaagaatgaagtggaggaagtaacttttacaaaacatacccagtgtttggggtgtttcaaaagtggattttcctgaatattaatcccagccctacccttgttagttattttaggagacagtctcaagcactaaaaagtggctaattcaatttatggggtatagtggccaaatagcacatcctccaacgttaaaagacagtggatcatgaaaagtgctgttttgtcctttgagaaagaaataattgtttgagcgcagagtaaaataaggctccttcatgtggcgtattgggccatagcctataattggttagaacctcctattttaattggaattctggatctttcggactgaggccttctcaaactttactctaagtctccaagaatacagaaaatgcttttccgcggcacgaatcagactcatctacacagcagtatgaatgatgttttagaatgattccctcttgctattggaatgtggtccagacgtcaaccaggaacatgtaacttggagagggacgaagaaagggtctgataaacacagaggttttaaacagtccctaccattggcctgcatcatgacaaagttacaaattcaaggagatataaaatctagatcaattaattcttaataggctttatcgtttattgcttaatccctctctcccccttcttttttgtctcaagattatattataataatgttctctgggtaggtgttgaaaatgagcctgtaatcctcagctgacacataatttgaatggtgcagaaaaaaaaaaagaaaccgtaattttattattagattctccaaatgattttcatcaatttaaaatcattcaatatctgacagttactcttcagttttaggcttaccttggtcatgcttcagttgtacttccagtgcgtctcttttgttcctggctttgacatgaaaagataggtttgagttcaaattttgcattgtgtgagcttctacagattttagacaaggaccgtttttactaagtaaaagggtggagaggttcctggggtggattcctaagcagtgcttgtaaaccatcgcgtgcaatgagccagatggagtaccatgagggttgctatttgttgtttttaacaactaatcaagagtgagtgaacaactatttataaactagatctcctatttttcagaatgctcttctacgtataaatatgaaatgataaagatgtcaaatatctcagaggctatagctgggaacccgactgtgaaagtatgtgatatctgaacacatactagaaagctctgcatgtgtgttgtccttcagcataattcggaagggaaaacagtcgatcaagggatgtattggaacatgtcggagtagaaattgttcctgatgtgccagaacttcgaccctttctctgagagagatgatcgtgcctataaatagtaggaccaatgttgtgattaacatcatcaggcttggaatgaattctctctaaaaataaaatgatgtatgatttgttgttggcatcccctttattaattcattaaatttctggatttgggttgtgacccagggtgcattaacttaaaagattcactaaagcagcacatagcactgggaactctggctccgaaaaactttgttatatatatcaaggatgttctggctttacattttatttattagctgtaaatacatgtgtggatgtgtaaatggagcttgtacatattggaaaggtcattgtggctatctgcatttataaatgtgtggtgctaactgtatgtgtctttatcagtgatggtctcacagagccaactcactcttatgaaatgggctttaacaaaacaagaaagaaacgtacttaactgtgtgaagaaatggaatcagcttttaataaaattgacaacattttattaccacaaaaaaaaaaaaaaaaaaaaaaaaaaaaa

SEQ ID NO: 1859 - DNA, 2150 bp, Homo sapiens
gactgacttcgctactaaactgcgcgaactgggcgatgttattttgtgcgagagtttgtaggtgattgctgatttcactgtcctgctgatacagcgccacaaatcgctatattggctaacggtagttaacgttgttgcgacctgcgcacgaacacccggatcttcaatgcgtatttgccgacgttgcagaattttcaccgcattattgagctgcttttccagcgttggtgcatttttctggatctgctccagccccagattcatcaccatttgctgcacccgcagagcgctaaggcgcagttcattcatctggttaacatactcaagatcgatatcaatcagccgatcgagtgcactttcagcagcctgacgctgatcttgttcgatcaaatcgtaaatcccggcctgggtcgctccagcggaagttgtcgcattattcgcctgaccttgcgccaggcgtgcgatctcatcggcggcagcgactatctgctgactgagttgctgttgttgctggcgcagttgcaaacgctgccccaccagttccccttgctgacgtaacgaacgggagatctcctgctcctgttgttcaatagcggtggtatcaaaaccttgwtcccgtaacgcttgcagcaacgcattaatcttcaggctttgtgcggtgagcattcgcccctgcgcctgccacatcttttcgytatcggcactggtcaggttctgcgcggcgaaaagttcccaggcgctggcttcgctcaactggcgcgccatattcatggtaggaatcaatgcctgagtgttgtctttttccacctggctgataaagcgcagttgtaccatcccaccagggtactggtcagggttaacagcgccatcagggcaaagcccatccagagtcttcgggtcagggttaaattcacggtcggtgcactttaggtgaaaaaggttgagtcgcaaagcggaatgcatctagcataaagccttattattgatgaggctatcatgcgcgtactgctatttttacttctttcccttttcatgttgccggcattttcggctgataacctgttgcgctggcatgatgcgcagcatttcacggtgcaagcctctacgccgcttaaagccaaacgcgcatggaaactgtgcgcgctttatcccagcctgaaagattcatattggttatcgttgaactatggtatgcaggaggctgctcgccgctacggtgtggatttaaaagtgctggaggcaggcggctacagccagttggctacccagcaagcacaaatcgaccagtgtaaacagtggggcgcagaggccattttgctcggtagtagcacgacctcatttcccgactgcaaaagcaggtarcaartctgccgktgatcgaamtggtaaatgctawtgatgctccccagktgaaaarccccgttggtgtgccctggtttcagatgggctatcaaccggggcgatatctggtgcaatgggcgcacggtaaaccactgaatgtgctgttgatgcccggacccgataacgccgggggcagtaaggagatggtcgagggttttcgcgcagccattgccggaagcccggtgcgtattgttgatattgcgcttggtgataacgatattgaaatccagcgtaacctgttgcaggagatgctggaacgccatccagaaatcgacgtcgttgcggaacggccattgcggcagaggcggcaatgggggaagggcgtaacctgaaaacgccgcttaccgtggtgtcgttttatctttcacatcaggtgtatcgcgggctgaagcggggaagagtgattatggctgccagcgatcaaatggtctggcagggggaactggcggttgagcaggccatcaggcaattacaggggcaatcggtttctgataatgtcagcccaccgattttagttctgacgccgaaaaatgccgaccgtgaacatattcgccgctcgctgtcaccagggggatttcgtccggtctatttttatcagcacacatcagcggctaagaaataaccttcaccatgttgcgtcaccagtaaatccgcgctgagtttatgacgtaaacgacgaattaacacatcgacggtgcgcaggtcagggttttccacccgacgcgcagaaagcatacgtagcagacgtt

SEQ ID NO: 1860 - DNA, 522 bp, Homo sapiens
  misc_feature (39)..(39): n equals a,t,g, or c
  misc_feature (58)..(58): n equals a,t,g, or c
  misc_feature (60)..(60): n equals a,t,g, or c
  misc_feature (88)..(88): n equals a,t,g, or c
  misc_feature (113)..(113): n equals a,t,g, or c
acagcttatgacccttgattaccgccaagctccgaaatnaacccttcacctaaaaggnanccaaaagctggagctcccaccggcggtngcggccgcttcctagaacttagtgnatccccccggggctgcaggaattcacggtcggtgcactttaggtgaaaaaggttgagtcgcaaagcggaatgcatctagcataaagccttattattgatgaggctatcatgcgcgtactgctatttttacttctttcccttttcatgttgccggcattttcggctgataacctgttgcgctggcatgatgcgcagcatttcacggtgcaagcctctacgccgcttaaagccaaacgcgcatggaaactgtgcgcgctttatcccagcctgaaagattcatattggttatcgttgaactatggtatgcaggaggctgctcgccgctacggtgtggatttaaaagtgctggaggcaggcggctacagccagttggctacccagcaagcacaaatcgaccagtgtaaacagt

SEQ ID NO: 1861 - DNA, 2146 bp, Homo sapiens
  misc_feature (40)..(40): n equals a,t,g, or c
  misc_feature (78)..(78): n equals a,t,g, or c
actgacttcgctactaaactgcgcgaactgggcgatgttnattttgtgcgagagtttgtaggtgattgctgatttcantgtcctgctgatacagcgccacaaatcgctatattggctaacggtagttaacgttgttgcgacctgcgcacgaacacccggatcttcaatgcgtatttgccgacgttgcagaattttcaccgcattattgagctgcttttccagcgttggtgcatttttctggatctgctccagccccagattcatcaccatttgctgcacccgcagagcgctaaggcgcagttcattcatctggttaacatactcaagatcgatatcaatcagccgatcgagtgcactttcagcagcctgacgctgatcttgttcgatcaaatcgtaaatcccggcctgggtcgctccagcggaagttgtcgcattattcgcctgaccttgcgccaggcgtgcgatctcatcggcggcacgactatctgctgactgagttgctgttgttgctggcgcagttgcaaacgctgccccaccagttccccttgctgacgtaacgaacgggagatctcctgctcctgttgttcaatagcggtggtatcaaaaccttgttcccgtaacgcttgcagcaacgcattaatcttcaggctttgtgcggtgagcattcgcccctgcgcctgccacatcttttcgttatcggcactggtcaggttctgcgcggcgaaaagttcccaggcgctggcttcgctcaactggcgcgccatattcatggtaggaatcaatgcctgagtgttgtctttttccacctggctgataaagcgcagttgtaccatcccaccagggtactggtcaggttaacagcgccatcagggcaaagcccatccagagtcttcggtcaggttaaattcacggtcggtgcactttaggtgaaaaaggttgagtcgcaaagcggaatgcatctagcataaagccttattattgatgaggctatcatgcgcgtactgctatttttacttctttcccttttcatgttgccggcattttcggctgataacctgttgcgctggcatgatgcgcagcatttcacggtgcaagcctctacgccgcttaaagccaaacgcgcatggaaactgtgcgcgctttatcccagcctgaaagattcatattggttatcgttgaactatggtatgcaggaggctgctcgccgctacggtgtggatttaaaagtgctggaggcaggcggctacagccagttggctacccagcaagcacaaatcgaccagtgtaaacagtgggccgcagagcccattttgctcggtagtagcacgacctcatttcccgactgcaaaagcaggtagcaagtctgccggtgatcgaactggtaaatgctattgatgctccccaggtgaaaagccccgttggtgtgccctggtttcagatgggctatcaaccggggcgatatctggtgcaatgggcgcacggtaaaccactgaatgtgctgttgatgcccggacccgataacgccgggggcagtaaggagatggtcgagggttttcgcgcagccattgccggaagcccggtgcgtattgttgatattgcgcttggtgataacgatattgaaatccagcgtaacctgttgcaggagatgctggaacgccatccagaaatcgacgtcgttgcggaacggccattgcggcagaggcggcaatgggggaagggcgtaacctgaaaacgccgcttaccgtggtgtcgttttatctttcacatcaggtgtatcgcgggctgaagcggggaagagtgattatggctgccagcgatcaaatggtctggcagggggaactggcggttgagcaggccatcaggcaattacaggggcaatcggtttctgataatgtcagcccaccgattttagttctgacgccgaaaaatgccgaccgtgaacatattcgccgctcgctgtcaccagggggatttcgtccggtctatttttatcagcacacatcagcggctaagaaataaccttcaccatgttgcgtcaccagtaaatccgcgctgagtttatgacgtaaacgacgaattaacacatcgacggtgcgcaggtcagggttttccacccgacgcgcagaaagcatacgtagcagacgtt

SEQ ID NO: 1862 - DNA, 2132 bp, Homo sapiens
  misc_feature (2073)..(2073): n equals a,t,g, or c
gggaaaggggactgcgtactccgcagatggtgttagtttttgcctatctgtgtgttctattaattgtttgttgggtaacttcaaaaaccagcttggctcttaagtacactgtttataaaaattttaaaagacttatttggaataaatctattctgatcatcacattaacaccctaatcagaaataagagaggtgtgttattgtcaccagggtggtgagctgcctagctctgattggcacatattgggaagttgagtttgagactgaacacattaagttcaaagtacagatttcgtggggagacccagacccccaccagcattaggagtaaaataaaataggcaatataaagaagggactggcaaatagatcactagctagaataatggcaagggagatttattatatctttattaagacactgctgacttgatgatgagtaaaagctcatcatccttgagggctgtgccatctcactctcaggccatctccttccttcccccaccatttctcctctttgkttccaccacatgcctggggcctycaggagttccgtgccactgggtcacctgscaggactcagctctcagataaaatcccctggacacacagaatggggtccctgagacgtttgatctcccatattccagggcgtctgggctgcctgctcatcctccttgccccaggagccatgctaaggatgggactgctccttggctgtcamtgcccgsagccamagcytcaatgsccacaatgactgatctgggcatgtctgtgccaacttcacctttaaaaaggttagaaaacagcattccactgttgggttgacagacaatacttgatgttttgtttttaagaaagcatgcaaagaatctgaacatgtggaactaaatttaaatgcacatctaatatgtgcttttcctaaatgcaaagatttaccaatgtaatgattttatattcttttgtcttatgaaaaatgaagaaaaatwagacaaatttatttaaatatctagktggrstycaaatctggaaagaaaagtacattctctatgagaaacatattcatatctgacaagaaatgtttttccccratcccacccatccactgctgccaagtcagtctacctgaacctcacattacccagctcaaaaatctgtgttatgggttgaattgtgtcccttcgaaattcctgtattgaagccttaacccctagaactcagcatgtgatggtatttagaaatggagtctttaaagaagtgaccaagttaaaatgaggctgtgagagtcggtcttaatccaatatgactggtgcccttatatcagaggagattaggacacagacacagaggaagaccacatgaagatatgaggagaaggtggccaccgataagccaaggagagaggtctggaatggatccttcactcatggctctcagaaggaatcaaccatgctgagaacttgattttggacttccagcctccagaactatgagaaaataaatttctgctgttttaagccacccagcctgtggtactttgktatgscagtctgagccaattaatataatatgtgatcattctgcaagtcctaccaattaaattcagacacagagccccagcagactcctgkctcctctggcccatgygtatcctgkgttttagccactgkggacttgtcctcagtgttctctgcacctgtgtgtaggtaacamccatcttcaaagcatggtgagsccatgggtgctggacagtcccacagttcccatccctgaacctacaggggctatcttggcaccccaggtgtggtcccactcccctcagcccactttccctttttctgctcagcccctttgagggtctctgacttgggactatcatttgcatctgtctctgatgtgggtcctggttaccaactttgggtctcttttgtcttcatgctctgtagatcatgggacaggggaccccaactcaaaattccagctcgaatttgagccattccctccatgtgaatgcctttgtcctctttgctacttttcaaaaaattatacaatgtcttccaggaagcattccaancagctcgtrccgaattcgatatcaagcttatcgataccgtcgacctcgrgggggggccc

SEQ ID NO: 1863 - DNA, 2118 bp, Homo sapiens; identical to SEQ ID NO: 460
  misc_feature (1518)..(1518): n equals a,t,g, or c
  misc_feature (1646)..(1646): n equals a,t,g, or c

SEQ ID NO: 1864 - DNA, 1389 bp, Homo sapiens
agacagtgaaggagataacttcaaggctatgtaagaaaaatgcacattctttgtgaaactaatgtgtacccactgcttcttaattttgtgctgtggattttatagtctgagattttgttacagttgtccacaaggcgtccttcctccatgtgattttagttaagcacatcttttgtcatgatgtcctcggttgtgtattgtgtgtcttcgtgccttcgcgtactacaaaatgtataagaagttcctgctcctcccaagttgctttcagcatgtggaattttatacatatatcatttgtttacttccaaaactttttagttgcctgttcttcagttacgccagcatatcctttatttctttcgtattggcacagttctctatgtawkcrattwgagagsgaagcaaaggggaaaagtttgagttagctgttctytgtcctagaatttccctgcattaatcttgtccttgaaaatatatataatactggtcccttaaactccatgaggctttgtctcattatgtattgttcttttggtaccctttcccacttaacttaccttttgctcctaagtcctataaaataccccttggatctggattttttatacccgattttctccactgkgtataaaaggtatattgtgactgtaaatttttgkatatcatgttctgagagcttcttactttctgatctcatagcactattcctgatcagagaactccagttgcttcaacacacagtatcagtagtgcagccaccccagatcgaatccgcttcccaagaggcactgccagtcgtagcactttccacggccagccccgggaacggcgaaccgcaacatataatggccctcctgcctctcccagcctgtcccatgaagccacaccattgtcccagactcgaagccgaggctccactaatctctttagtaaattaacttcaaaactcacaaggagtcgcaatgtatctgctgagcaaaaagatgaaaacaaagaagcaaagcctcgatccctacgcttcacctggagcatgaaaaccactagttcaatggatcccggggacatgatgcgggaaatccgcaaagtgttggacgccaataactgcgactatgagcagagggagcgcttcttgctcttctgcgtccacggagatgggcacgcggagaacctcgtgcagtgggaaatggaagtgtgcaagctgccaagactgtctctgaacggggtccggtttaagcggatatcggggacatccatagccttcaaaaatattgcttccaaaattgccaatgagctaaagctgtaacccagtgattatgatgtaaattaagtagcaattaaagtgttttcctgaaaaaaaaaaaaaaaaaaaaaaaaaaaaaaaaaaaaaat

SEQ ID NO: 1865 - DNA, 1875 bp, Homo sapiens; identical to SEQ ID NO: 342
  misc_feature (4)..(4): n equals a,t,g, or c
  misc_feature (1872)..(1872): n equals a,t,g, or c

SEQ ID NO: 1866 - DNA, 1715 bp, Homo sapiens
tcgacccacgcgtccggaacagcgctcccgaggccgcgggagcctgcagagaggacagccggcctgcgccgggacatgcggccccaggagctccccaggctcgcgttcccgttgctgctgttgctgttgctgctgctgccgccgccgccgtgccctgcccacagcgccacgcgcttcgaccccacctgggagtccctggacgcccgccagctgcccgcgtggtttgaccaggccaagttcggcatcttcatccactggggagtgttttccgtgcccagcttcggtagcgagtggttctggtggtattggcaaaaggaaaagataccgaagtatgtggaatttatgaaagataattaccctcctagtttcaaatatgaagattttggaccactatttacagcaaaattttttaatgccaaccagtgggcagatatttttcaggcctctggtgccaaatacattgtcttaacttccaaacatcatgaaggctttaccttgtgggggtcagaatattcgtggaactggaatgccatagatgaggggcccaagagggacattgtcaaggaacttgaggtagccattaggaacagaactgacctgcgttttggactgtactattccctttttgaatggtttcatccgctcttccttgaggatgaatccagttcattccataagcggcaatttccagtttctaagacattgccagagctctatgagttagtgaacaactatcagcctgaggttctgtggtcggatggtgacggaggagcaccggatcaatactggaacagcacaggcttcttggcctggttatataatgaaagcccagttcggggcacagtagtcaccaatgatcgttggggagctggtagcatctgtaagcatggtggcttctatacctgcagtgatcgttataacccaggacatcttttgccacataaatgggaaaactgcatgacaatagacaaactgtcctggggctataggagggaagctggaatctctgactatcttacaattgaagaattggtgaagcaacttgtagagacagtttcatgtggaggaaatcttttgatgaatattgggcccacactagatggcaccatttctgtagtttttgaggagcgactgaggcaaatggggtcctggctaaaagtcaatggagaagctatttatgaaacccatacctggcgatcccagaatgacactgtcaccccagatgtgtggtacacatccaagcctaaagaaaaattagtctatgccatttttcttaaatggcccacatcaggacagctgttccttggccatcccaaagctattctgggggcaacagaggtgaaactactgggccatggacagccacttaactggatttctttggagcaaaatggcattatggtagaactgccacagctaaccattcatcagatgccgtgtaaatggggctgggctctagccctgactaatgtgatctaaagtgcagcagagtggctgatgctgcaagttatgtctaaggctaggaactatcaggtgtctataattgtagcacatggagaaagcaaatgtaaaactggataagaaaattattttggcagttcagccctttccctttttcccactaaattttttcttaaattacccatgtaaccattttaactctccagtgcactttgccattaaagtctcttcacattgaaaaaaaaaaaaaaaaa

SEQ ID NO: 1867 - DNA, 2325 bp, Homo sapiens
  misc_feature (259)..(259): n equals a,t,g, or c
  misc_feature (2219)..(2219): n equals a,t,g, or c
  misc_feature (2231)..(2231): n equals a,t,g, or c
  misc_feature (2234)..(2234): n equals a,t,g, or c
  misc_feature (2290)..(2290): n equals a,t,g, or c
  misc_feature (2303)..(2303): n equals a,t,g, or c
  misc_feature (2311)..(2311): n equals a,t,g, or c
ggtccggaattcccgggtcgacccacgcgtccgctcaacttctaccagttcctcggggtgcagcaggatgcatcatctgcagacatcagaaaagcatatcgtaagctttcactaactttacatccagacaagaataaagatgaaaatgcagaaactcagtttagacaattggtggccatttatgaagttttaaaggatgatgaacgaaggcagaggtatgatgatattctgatcaatggacttccagattggcgacagnctgtattctactacaggcgggtgagaaaaatgagcaatgctgagctggcattactcttgttcattattctcacagtgggtcattatgctgtggtttggtcaatctacctggaaaaacaactggatgaactactaagtagaaaaaagagagaaaagaaaaaaaagactggcagcaagagtgtggatgtatcaaaactcggtgcttcagaaaaaaatgaaagattgctgatgaaaccacagtggcatgatttgcttccatgcaaactggggatttggttttgccttacactaaaagcattacctcacctcatccaggatgctgggcagttttatgctaaatataaagaaacaagattgaaggaaaaggaagatgcactgactagaactgaacttgaaacacttcaaaaacagaagaaagttaaaaaaccaaaacctgaatttcctgtatacacacctttagaaactacatatattcagtcttatgatcatggaacttccatagaagaaattgaggaacaaatggatgattggttggaaaacaggaaccgaacacagaaaaaacaggcacctgaatggacagaagaggacctcagccaactgacaagaagtatggttaagttcccaggagggactccaggtcgatgggaaaagattgcccacgaattgggtcgatctgtgacagatgtgacaaccaaagccaagcaactgaaggattcagtgacctgctccccaggaatggttagactctccgaactcaaatcgacagttcagaattccaggcccatcaaaacggccaccaccttgcccgatgacatgatcacccagcgagaggacgcagagggggtggcagcggaggaggagcaggagggagactccggtgagcaggagaccggggccactgatgcccggcctcggaggcggaagccagccaggctgctggaggctacagcgaagccggagccagaggagaagtccagagccaagcggcagaaggactttgacatagcagaacaaaacgagtccagcgacgaggagagcctgagaaaagagagagctcggtctgcagaggagccgtggactcaaaatcaacagaaacttctggaactggcgttgcagcagtacccaaggggatcctctgaccgctgggacaaaatagccagatgtgtcccgtccaagagcaaggaagactgtatcgctaggtacaagttgctggttgaactggtccaaaagaaaaaacaagctaaaagctgaatattctgggagatgatgttcaccttcattttccaaaatgaatatcttaaaaatcttatgcagaaatttgcattttgtacctcaatatttctacgtcatgtgccttagtaaaaaaaaataataaataaataaaagatgaaaaaaaaaaaaaaaagggcggccgctctagaggatccctcgaggggcccaagcttacgcgtgcatgcgacgtcatagctctctccctatagtgagtcgtattataagctagcttgggatctttgtgaaggaaccttacttctgtggtgtgacataattggacaaactacctacagagatttaaagctctaaggtaaatataaaatttttaagtgtataatgkgttaaactarctgcatatgcttgctgcttgagagttttgcttactgagtatgatttatgaaaatattatacacaggagctagtgattctaattgkttgtgtattttagattcacagtcccaaggctcatttcaggcccctcagtcctcacagtctgktcatgatcataatcagscataccacatttgtagaggktttacttgctttaaaaaacctyccacacctycccctgaacctgaaacataaaatgaatgcaattgktgktggtaacttggttattgcagcttataakggttacaaataaagcaatagcatcacaaatttcacaaataaagcatttttttcactgnattctaagttgnggnttggccaaactcatcaatggatcttatcatggctggatcgatcctggcatttaaangacggcaaacgcncggggaanaggcgggtttggcg

SEQ ID NO: 1868 - DNA, 3530 bp, Homo sapiens
gagattgaaaatgcagtggagascggccgggcactgctacccattctccagtggcacaagcaccccaatgattactttagtaaggaggcatccaaattgtactttaacagcttgaggacttactggcaagagcttatagacctcaacactggtgagtcgactgatattgatgttaaggaggctctaattaatgccttcaagaggcttgataatgacatctccttggaggcgcaagttggtgatcctaattcttttctcaactacctggtgcttcgagtggcattttctggagccactgcttgtgtggcccatgtggatggtgttgaccttcatgtggccaatactggcgatagcagagccatgctgggtgtgcaggaagaggacggctcatggtcagcagtcacgctgtctaatgaccacaatgctcaaaatgaaagagaactagaacggctgaaattggaacatccaaagagtgaggccaagagtgtcgtgaaacaggatcggctgcttggcttgctgatgccatttagggcatttggagatgtaaagttcaaatggagcattgaccttcaaaagagagtgatagaatctggcccagaccagttgaatgacaatgaatataccaagtttattcctcctaattatcacacacctccttatctcactgctgagccagaggtaacttaccaccgattaaggccacaggataagtttctggtgttggctactgatgggttgtgggagactatgcataggcaggatgtggttaggattgtgggtgagtacctaactggcatgcatcaccaacagccaatagctgttggtggctacaaggtgactctgggacagatgcatggccttttaacagaaaggagaaccaaaatgtcctcggtatttgaggatcagaacgcagcaacccatctcattcgccacgctgtgggcaacaacgagtttgggactgttgatcatgagcgcctctctaaaatgcttagtcttcctgaagagcttgctcgaatgtacagagatgacattacaatcattgtagttcagttcaattctcatgttgtaggggcgtatcaaaaccaagaatagtgagtggctctttcactggcaattctcaaatgatacacatttaaagggcagattttttaaaaagatactactataataaacatttccagttggtcattctaagcatttacccttttgatactctagctagtcaggtactccaaattgactttgcagcagggtggcagggtcaggagagtctggtcctgcctagctcagatttcatggcacctgcacttgaagcaagtcacttctttatcacaggtgtcttgaaacattagcttcttttaccaacctgagaaaattaggatgacctggcaaataagatcttgaataggccaaaagcaagtatcttgctgtgtgtagtctcttggttaaagtgaagaaacagtactgttcacacctttcttcactgagattccagtgtacatgagaacatatatttattgcatgattttctagatacacagtctatgcattattcatatacatttattttagcctaaagtggttttcaaatccagttcttcaagccataaatgaccaagatccaagcaatctgaatttgtttttgtgattatttgactggaatgcttcttaagtggaataactatactccgttatccacccgatttcctaatgtaattgaaasattttctattttgccacacacttggagacaataagggtttttagttttatctactcttctattgaagttaaagaaagaaaaaaagatttttttatttgtattaatgaaaagctttagtttaaaataaggagatccagaataaaaagaagagactgatctcttcaattattgtcatctgtagccaccagcacatcactcttatgtaatccccaaaggcttggcatgccgtaagtgtgtggtgggtagactgctgccggggaatcgtacttcttatttagtaatgataagacttttcattatttttggaattttaaagatgacataaataagtttaaatatcaatttggggagtaaggtttaatattgccatcgggtattgagacaggaggaagtttctgtttttctccatttagacataggtcaattaaaatatttgggtttaaaatgactaaatgctttaaacatattgtagcttaagatatatgtgttaagatatatacatgagaaactttaaaaggtaactactgtgcatgcctgatgcttaatagaatacttagtggcatcaaatgtttgcagcagtctccataattatattcagtcccttctaatactgtatcaatgtaaatgaaataaatatattcaaattggctttttgatatgcatcaagtggcattttgttcctgtgtttaatagtgatctgtatacagctgtgcacatattgtcatcacttattctagcatcactgttaaggctgtgattatgtttgatattcacctggattttaatacaagccaatatcagcttcccattgtgtaataacttgggtgtttaggagtcttttcacattttttggggatatgaactagatgttcaagaactccttctggactgtggatactgaatcagtgtactattggctgcagaatttgtttcaattgaaaatagactcaggaagattgctgctcagaatatcatataatgtttattttttgaggtgtttttgtttttatttgtgtgtttttttttttttaagtcagcttggaacttttttcctgggtagtatttgggagagggaaaggctgtactatatatttatttctaaatgttttgactgggcatttttcttttaatgaaatatgtggactgctctagcaaaccctattttcagctactatttgaatattcttgaacaccaccactgaagagtttcatatacaccaaataatgtctcatctctatagtacagggaatataaaattggtttcctgtggtcatgatcaagatagtagtattattacacaagaaacttggtctgcagtctggaagcttgtctgctctatagaaatgaaaatgcagcatgaagttgacattgtggaaatgaaagtaattgggtattagaaatctgaaagtactgtcatctaaaagcaattgtgattttattgtaattggttgtcactgttgtacggtgtctagaattaaagaatacatgtaaactttcatggtatttagcctttcttaaatttttttaaaatttaaactttctaacctatgtattcaacttctgtatttatatttaatcagtggttcatgttatataatacacccttaactagttaaatggaatgttggtatggtacagagtaccatattgctaagaaaactgtcttataaaagatgtatatgtgtgaagacatgaaagtttaatgtacagaatggttggagaaatgcctatggtgaattaaagcttcatatctgcttaaaaaaaaaaaaaaaaaaaaaaaaaaaaaaaaaaaaaaaaaaactcgag

SEQ ID NO: 1869 - DNA, 1576 bp, Homo sapiens
  misc_feature (7)..(7): n equals a,t,g, or c
ccacgcntccgtaagctttcactaactttacatccagacaagaataaagatgaaaatgcagaaactcagtttagacaattggtggccatttatgaagttttaaaggatgatgaacgaaggcagaggtatgatgatattctgatcaatggacttccagattggcgacagctgtattctactacaggcgggtgagaaaaatgagcaatgctgagctggcattactcttgttcattattctcacagtgggtcattatgctgtggtttggtcaatctacctggaaaaacaactggatgaactactaagtagaaaaaagagagaaaagaaaaaaaagactggcagcaagagtgtggatgtatcaaaactcggtgcttcagaaaaaaatgaaagattgctgatgaaaccacagtggcatgatttgcttccatgcaaactggggatttggttttgccttacactaaaagcattacctcacctcatccaggatgctgggcagttttatgctaaatataaagaaacaagattgaaggaaaaggaagatgcactgactagaactgaacttgaaacacttcaaaaacagaagaaagttaaaaaaccaaaacctgaatttcctgtatacacacctttagaaactacatatattcagtcttatgatcatggaacttccatagaagaaattgaggaacaaatggatgattggttggaaaacaggaaccgaacacagaaaaaacaggcacctgaatggacagaagaggacctcagccaactgacaagaagtatggttaagttcccaggagggactccaggtcgatgggaaaagttgcccacgaattgggtcgatctgtgacagatgtgacaaccaaagccaagcaactgaaggattcagtgacctgctccccaggaatggttagactctccgaactcaaatcgacagttcagaattccaggcccatcaaaacggccaccaccttgcccgatgacatgatcacccagcgagaggacgcagagggggtggcagcggaggaggagcaggagggagactccggtgagcaggagaccggggccactgatgcccggcctcggaggcggaagccagccaggctgctggaggctacagcgaagccggagccagaggagaagtccagagccaagcggcagaaggactttgacatagcagaacaaaacgagtccagcgacgaggagagcctgagaaaagagagagctcggtctgcagaggagccgtggactcaaaatcaacagaaacttctggaactggcgttgcagcagtacccaaggggatcctctgaccgctgggacaaaatagccagatgtgtcccgtccaagagcaaggaagactgtatcgctaggtacaagttgctggttgaactggtccaaaagaaaaaacaagctaaaagctgaatattctgggagatgatgttcaccttcattttccaaaatgaatatcttaaaaatcttatgcagaaatttgcattttgtacctcaatatttctacgtcatgtgccttagtaaaaaaaaataataaataaataaaagatgaaaaaaaaaaaaaaaaaaaaa

SEQ ID NO: 1870 - DNA, 2342 bp, Homo sapiens
  misc_feature (2325)..(2325): n equals a,t,g, or c
gaagagctatgacgtcgcatgcacgcgtacgtaagcttggatcctctagagcggccgccctttttttttttttttttttttttttttttttttttttttttttwgttgttttagggctttttattgaatagaaaaaatataaacaatgttgtagagtaatgagaaatcctccacactgaaaaaaaactagtagttttaatttttttggaatcatattttctgaggtgtaactggctttcattagatgatcatacttttcctgacatttttacaatgtattctttctttaaatataaaaactgacaagataaatatagtgtttcaacttcttagcctatttgtgatttttctgttttcctctgacccatcattgattctataaaaaagtgccaggccaagaaacaatagttagagtaattcttcctttaagttctttcagcagtcttgccaagcaagcatgtatcattcctgatgtacttctaccattgacagcaagaagaatatcaccacatctaattcttccatcattgtatgctggtgttccttcaacaatggatttgatgaaaaaaggtttgtttccattgtattcttcataacctcctacaatgcagaagcccagacttccagctgtgtttcttcgtaatacaatatctttacagttatacaagcaccgtggtaattccagccacatgacccaggatggggaccagtcactgggtggggccatgttgtggttggagtccagggctgctgggctgctgcagtcttcctggggctcatactctttgacttccaaagctttgagtactatcgaggatgatgttcttttcaataatgccactgcctcactccggctgacctctgtcagttcgaccccatccacattcaacaaaatgtcacctgtttttattcttccatctctgcttatgactcctccgggctcaacactgatgacatagataggcaaatcccattctctatgtgatgctccccctgcgacggtcatgccgagagattcaccggggtctttttggatatttaccaccttctcatgacaagtaattgtaggatggaggggcttgggagtgttgctcctctcccctggccctggggaccagctgccattgctgttccagccggcttcctgaaagatgtcagggctccgctgccgaacctggcgggacacgacgaggtgaacacgtctttcactggcctgaatcagatgagccgcactttctgggctgccatatcgaagatcatgtccattgatggctaacacacggtcattctcctcaagctgaccatgtcgatatgccacaccgccatccagcacattgaagatgaaaaccccaggctcatccaccttgcgcaccagttttattccaagctgctcctcggggctacttttgttgagaatcacatgaaagctgtcatctcggggtctgtaggcatccggggcctgtccattgttcctgctgcggaacttctgttcacgcatcacagtcagccacagcacctggcagggctgccgcaggagacgcacagcgtagttgtgagggacattgctgatgtccatcccgttgacctttagaatgatgtctcctggcagtagccggccgtctctggcgatcaccccatcacgataaatgtgttggataatgatatggaccagtggggtttcgctacctcccaccagcctaatagagaggctttcactgggatctactcgattgatcttgatgctggtaatttcaccatctggaatcaggtggtacaaccttggaaagacttcaggggcagtggtgttttcagaattttccctgccctggtcggcatggttggcaactgcactcccgctctttgtccttcgaagaacactcaaagctcgatttatttttttaaatgatctgcttctaatagtggatctctcaaagggccgtgccctagttcggttgctccggccagagtccactgggctgattgctggctgcccgtcctctgccgaggacacgtaggcagggttgtctaggccaggctcgtctgtcattaaggagatggtggcagctgcagaaacctctggggagggagccgtggctgtgaggctcgcacagccgtctggacagccatcttgtgagcgcctcttcctatctttggtcaggccgtagtgggaggcacctttacagagttctgaatacaggaagtgcaggttgcccacattgtcaatgtagttagcaggactgagccaaggcaagaccagcaacagaagcgccttcattctccgagcacggacgcgtgggtcgacccgggaattccggaccggtaccngcaggcgtaccaacttt

SEQ ID NO: 1871 - DNA, 1507 bp, Homo sapiens
ctgcaggtaccggtccggaattcccgggtcgacccacgcgtccgaagaaagaagcggggcgaataagcacggttgagctacagaaaatggtggctcgagtcttttattatctttgtgtcattgcactgcagtatgtggcgcctctggtaatgctgcttcacacaactctgcttttgaaaacactaggtaatcattcctggggtatttatccagaatctatctctaccttaccagtggataatagtctactgtccaattctgtttactctgaattaccatcagctgaagggaaaatgaaggtaactgttacacaaataacagtggcactgagcagcttaaaaaatatttttactcctcttctttttcgaggacttctgtcttttctgacctggtggattgctgcttgcctcttttctacaagcctttttgggcttttctatcaccagtatctgactgtggcatgaatctcagttaacaaaaaagcatatccaaatcaccctttaaattaaaatatctgtgcccttaaagggctgatgaaaaccagaagaaagcaaatacaatgggaaaaaaaaaacatatcagaatgtcttgtattaaatgtttcctctgtattctcagggtgaattaatgtagtaatatttaaaattacaaaatagattgttaactgttacactgtggcattggaattttaactctttgtatttactggtatgagagggctatctacaagggtaatatttctgattaccctggtttacagaaacctccagcagtctttgaaacatctcacatgactctagttattgattgcttttaatggttttatggtactgttgatagtcatagtggctgcctatagaacaatcttcaaactgagccatgctttaggggagggaaaggggctaaagtctcttctgttggtaatttattagttactcttgaaacartaaaatccaacagaaaggaagagatagctactgtatattacagtaaagaaagctgcatagttattttaaatttaatggagatgaatatggttaaaatatataactactgctgcttgagaatagcaagagtattgttttaaaacatattccacccaacttgagagttcttttaaaatgattggccatatgaacatttgtaatcttgccattaggtttggacctgccatattttgttttattctgtgatcctaactagttccttttaataggctaaaatatttatcaatactgatcagactttaaagaaattactttgtaaacctgctgactacctgtatgtattgtatatatattatatattaaatatataatatattgagattataaaagatgaaaatattgaatccttataatattttaagttgcagaatgtatgttaaaaagtgacttgaatgagatgtatttgtatctagaaattttatttctttttggaatgagattaaaatacattttgaaagttcaaaaaaaaaaaaaaaaaaaaaaaaaaaaagggcggccgc

SEQ ID NO: 1872 - DNA, 307 bp, Homo sapiens
  misc_feature (104)..(104): n equals a,t,g, or c
  misc_feature (186)..(186): n equals a,t,g, or c
  misc_feature (303)..(303): n equals a,t,g, or c
gggtaccgagctcgaattcatcgatgatggttgagatgtgtataagagacaggtagaaaagaggcaagcagcaatccaccaggtcagaaaagacagaagtcctngaaaaagaagaggagtaaaaatattttttaagctgctcagtgccactgttatttgtgtaacagttaccttcattttcccttnagctgatggtaattcatagtaaacagaattggacagtatactattatccactggtaaggtagagatagattctggataaataccccaggaatgattacctagtgttttcaaaagcanagtt

SEQ ID NO: 1873 - DNA, 714 bp, Homo sapiens
  misc_feature (519)..(519): n equals a,t,g, or c
  misc_feature (604)..(604): n equals a,t,g, or c
  misc_feature (617)..(617): n equals a,t,g, or c
  misc_feature (667)..(667): n equals a,t,g, or c
  misc_feature (672)..(672): n equals a,t,g, or c
ctttggaatttygggtcsacccacgcgtccgcccacgcgtccggtctactacaattttatgaagcctacacaggaaatgaatatcagcttagtctggtgcctacttgttttgtcttttgcaatcaaagttctattttcattaactacacactattttaaagtagaagatggtggtgaaagatctgtttgtgtcacctttggattttttttctttgtcaaagcaatggcagtgttgattgtaacagaaaattatctggaatttggacttgaaacagggtttacaaatttttcagacagtgcgatgcagtttcttgaaaagcaaggtttagaatctcagagtcctgtttcaaaacttactttcaaatttttcctggctattttctgttcattcattggggcttttttgacatttcctggattacgactggctcaaatgcatctggatgccctgaatttggcaacagaaaaaattacacaaactttacttcatatcaacttcttggsacctttatttatggntctgctctgggtaaaaccaatcaccaaagactacattatgaacccaccactgggcaaagaaagkatccctttaatgrcagaaagncacatttcgatantttgggaatttgggtaaaaatccggtgggggcttggggtgggcatgatgngaagnactggaggctaatttaattaacccaaaatggggggtaaataa

SEQ ID NO: 1874 - DNA, 1173 bp, Homo sapiens
  misc_feature (143)..(143): n equals a,t,g, or c
  misc_feature (160)..(160): n equals a,t,g, or c
  misc_feature (1141)..(1141): n equals a,t,g, or c
cccccttttttcccttcccctcctttgtggtaaaaagtgttgttttgtcttcctgaggaaaatgagtaaaacacaaagtaagcctaccttgttaggaactatgttaaagaatttcaagaaaggattcaatggggttaattttnccacatatcaccttgtnaggtttattataggctgtctcttatacacatctcaaccatcatcgatgaattcgagctcggtacccgcccccgatttagagcttgacggggaaagccggcgaacgtggcgagaaaggaagggaagaaagcgaaaggagcgggcgctagggcgctggcaagtgtagcggtcacgctgcgcgtaaccaccacacccgccgcgcttaatgcgccgctacagggcgcgtcaggtggcacttttcggggaaatgtgcgcggaacccctatttgtttatttttctaaatacattcaaatatgtatccgctcatgagacaataaccctgataaatgcttcaataatattgaaaaaggaagagtatgagtattcaacatttccgtgtcgcccttattcccttttttgcggcattttgccttcctgtttttgctcacccagaaacgctggtgaaagtaaaagatgctgaagatcagttgggtgcacgagtgggttacatcgaactggatctcaacagcggtaagatccttgagagttttcgccccgaagaacgttttccaatgatgagcacttttaaagttctgctatgtggcgcggtattatcccgtattgacgccgggcaagagcaactcggtcgccgcatacactattctcagaatgacttggttgagtactcaccagtcacagaaaagcatcttacggatggcatgacagtaagagaattatgcagtgctgccataaccatgagtgataacactgcggccaacttacttctgacaacgatcggaggaccgaaggagctaaccgcttttttgcacaacatgggggatcatgtaactcgccttgatcgttgggaaccggagctgaatgaagcctaccmaacgacgagcgtgacaccacgatgcctgtagcaatggcacaacgttgcgcaactattaactggsgaactacttactctacttccgggaaccattaatagactggatggangccggtaaagtgcaggaccctttttggcttgg

SEQ ID NO: 1875 - DNA, 800 bp, Homo sapiens
  misc_feature (14)..(14): n equals a,t,g, or c
  misc_feature (24)..(24): n equals a,t,g, or c
ccatttggctcagnaaaaattacncaaactttacttcatatcaacttcttggcacctttatttatggttctgctctgggtaaaaccaatcaccaaagactacattatgaacccaccactgggcaaagaaagtatccctttaatgacagaagccacattcgatactctgcgactctggttaataatcctgctgtgtgctttgcggttggccatgatgcgtagtcacctgcaagcttatttaaatttagcccaaaaatgtgtggatcagatgaagaaagaagcggggcgaataagcacggttgagctacagaaaatggtggctcgagtcttttattatctttgtgtcattgcactgcagtatgtggcgcctctggtaatgctgcttcacacaactctgcttttgaaaacactaggtaatcattcctggggtatttatccagaatctatctctaccttaccagtggataatagtctactgtccaattctgtttactctgaattaccatcagctgaagggaaaatgaaggtaactgttacacaaataacagtggcactgagcagcttaaaaaatatttttactcctcttctttttcgaggacttctgtcttttctgacctggtggattgctgcttgcctcttttctacaagcctttttgggcttttctatcaccagtatctgactgtggcatgaatctcagttaacaaaaaagcatatccaaatcaccctttaaattaaaatatctgtgcccttaaagggctgrtgaaaaccmgaagaaagcaatwccatgggaaaaaaaaaac

SEQ ID NO: 1876 - DNA, 5367 bp, Homo sapiens
ccacgcgtccggctctctcgccaaccgtggtggctccttgcgttcctacatcctctcatctgagaatcagagagcataatcttcttacgggcccgtgatttattaacgtggcttaatctgaaggttctcagtcaaattctttgtgatctactgattgtgggggcatggcaaggtttgcttaaaggagcttggctggtttgggcccttgtagctgacagaaggtggccagggagaaggcagcacactgctcggagaatgaaggcgcttctgttgctggtcttgccttggctcagtcctgctaactacattgacaatgtgggcaacctgcacttcctgtattcagaactctgtaaaggtgcctcccactacggcctgaccaaagataggaagaggcgctcacaagatggctgtccagacggctgtgcgagcctcacagccacggctccctccccagaggtttctgcagctgccaccatctccttaatgacagacgagcctggcctagacaaccctgcctacgtgtcctcggcagaggacgggcagccagcaatcagcccagtggactctggccggagcaaccgaactagggcacggccctttgagagatccactattagaagcagatcatttaaaaaaataaatcgagctttgagtgttcttcgaaggacaaagagcgggagtgcagttgccaaccatgccgaccagggcagggaaaattctgaaaacaccactgcccctgaagtctttccaaggttgtaccacctgattccagatggtgaaattaccagcatcaagatcaatcgagtagatcccagtgaaagcctctctattaggctggtgggaggtagcgaaaccccactggtccatatcattatccaacacatttatcgtgatggggtgatcgccagagacggccggctactgccaggagacatcattctaaaggtcaacgggatggacatcagcaatgtccctcacaactacgctgtgcgtctcctgcggcagccctgccaggtgctgtggctgactgtgatgcgtgaacagaagttccgcagcaggaacaatggacaggccccggatgcctacagaccccgagatgacagctttcatgtgattctcaacaaaagtagccccgaggagcagcttggaataaaactggtgcgcaaggtggatgagcctggggttttcatcttcaatgtgctggatggcggtgtggcatatcgacatggtcagcttgaggagaatgaccgtgtgttagccatcaatggacatgatcttcgatatggcagcccagaaagtgcggctcatctgattcaggccagtgaaagacgtgttcacctcgtcgtgtcccgccaggttcggcagcggagccctgacatctttcaggaagccggctggaacagcaatggcagctggtccccagggccaggggagaggagcaacactcccaagcccctccatcctacaattacttgtcatgagaaggtggtaaatatccaaaaaagaccccggtgaatctctcggcatgaccgtcgcagggggagcatcacatagagaatgggatttgcctatctatgtcatcagtgttgagcccggaggagtcataagcagagatggaagaataaaaacaggtgacattttgttgaatgtggatggggtcgaactgacagaggtcagccggagtgaggcagtggcattattgaaaagaacatcatcctcgatagtactcaaagctttggaagtcaaagagtatgagccccaggaagactgcagcagcccagcagccctggactccaaccacaacatggccccacccagtgactggtccccatcctgggtcatgtggctggaattaccacggtgcttgtataactgtaaagatattgtattacgaagaaacacagctggaagtctgggcttctgcattgtaggaggttatgaagaatacaatggaaacaaaccttttttcatcaaatccattgttgaaggaacaccagcatacaatgatggaagaattagatgtggtgatattcttcttgctgtcaatggtagaagtacatcaggaatgatacatgcttgcttggcaagactgctgaaagaacttaaaggaagaattactctaactattgtttcttggcctggcacttttttatagaatcaatgatgggtcagaggaaaacagaaaaatcacaaataggctaagaagttgaaacactatatttatcttgtcagtttttatatttaaagaaagaatacattgtaaaaatgtcaggaaaagtatgatcatctaatgaaagccagttacacctcagaaaatatgattccaaaaaaattaaaactactagttttttttcagtgtggaggatttctcattactctacaacattgtttatattttttctattcaataaaaagccctaaaacaactaaaatgatttgtataccccactgaattcaagctgatttaaatttaaaatttggtatatgctgaagtctgccaagggtacattatggccatttttaatttacagctaaaatattttttaaaatgcattgctgagaaacgttgctttcatcaaacaagaataaatatttttcagaagttatagttgtcttttagtatgtgatactaattaagattacttttgtattatcactatttaaaagatcctagtaatatattctttcaaataccatgttatttgttaccatcaccgatgaatacctcctaggcttatccctaaaaatgctcgctcagagaattaattataaacttgttttgtttttagtaagaaatggctaaagctctttttttcccacaatcgttagtaactgtataaaaactctatgctgctccaccagtgggccttggaaaatgcatcaagaaggccaaaccagcttgaccctggctcacagacatggtcatgaggcgatttaaatttgtgccacaatgaagagtgtgtgtacacatgcctcctagaaactacactatgggtaattaatttatttcatagaggccacccagatgccttataggttttattaatttggatatgaaagtgtaccccatttggtttcaccaggaacccaaatttagaatattgaaaagccatcaaaaagttgtgatatcaaaaatgtatgagtctcttaatatactaagcaagagtgtcacagcagtaatgataaagactagttttaatctcaagccttagaggggccctttgttgccttttgtggtgcagcctcttaagagagtggtgtttgattaacaaaaaaactgtggcccaagtggaacccttgaccttttctcagataatctgtgtatgtacacagctaacacagctctttagattccctgttaagtgactcattcacattccttttttggatataaagtcattgctgtctttttatttttgaaatagtacaagacaaagatttttaacttaacatgaaaaattcactcttttattttggaaaaaaagttaacttttcatactaacaaacagaacaagatttaaggtaaatttcttaagcattatccagaaaaataacaagatttatagtatctacttctggtactaatatacacaaaaggccaaaaccatgcctattctgcaggtgtagcttcggtgctctcctgttcaggggcaggctcactgcccgcttcttttccttctttgcttcttttagattttttgtgtttgtgtctcctgtgactatctccttcttcactttcatggcgacgtctactattacttcgagaagacttatgtctggtttcctctttctccctgtgtcgtctttctctatgtcgttcttctttttctcgacttgctctgtgacgctcataacctctttctgcatattccctgtatctgtatcgttcttcatcgctgttgaaaacacttggtgtaggactgtgatcacgctccctctctctctctctggtgcgttctctttctctgtcccgatcacggtctcgctctctgtctctgtctctctctctatctcggtctttctctcttctggcataatagtcccactgcttgctggtgtccacaagactaggccacgaaggagcagaaccaggaagatggggaaaggcaacattgccatatggaaatgcacgtgcagaacgactatcataaccagaggaatgtccactttctattgttggtataagagatggaggtggagcgcctggtggaggaggaaaacccggtggtggaatcagaggtggagcagtgctgacagtcggaggaggtggaagaaatggaggaggtggaaggtgagtgggaggagctcctggagggaaaaacggaggtggtttgctaaaattgttgtctacttcagtagcagatctttcagaaaggacctgtatgttgctgttctcatttgcccgtcgcctgccttctactcggctgatagttatagtctgaccgataacatcaattgccccaggtaatctcctgctcggtggaagcccagtcttgaacaaagaaggaggagaagtaaactcagcttttgtagatggaagggcagtttctttctctgagtttccagttcttccctgctgtaccgtaattttatttgtagtagaggttactggtataacttcaagtcccattcgtatcctcttttgtttttcacagtaagctttccaggtatcttcattaaacccataattaaaataatcagaaagatcagcaccaggtttacgccatggtttatcttcaaaagaatccaaatctacctctaagagtggaactccattaatgcttccaggtgcatcaaggtctactcctttgacttttgtccctgtagttccataaactcttccccctgtcttgatgttaagatttacaggtgctgtaccataactcccatactgtggtgctcccgttttaatgtctcctatagtgacatgaacatcatcttcatcatcatcgctgtcactatcactatcatcttcggtctcagtcactttcggttttggtaaaccattttcagcagtttcatcttcaattccagatggaggattagcactggcattttcttcttctggcctttcaacttcattttcatcgccatagagccactcttcctcctcatcccctccggtcccgccgctcagctccgacactaggcgctcgacctcgccggccgacatggccgccccgagcgcaacttaaacgcggcgatcaacagccccctccaaccccttccccagcctcgcagccccgaggcgcgagaagggcgcgaacccgccgacgaacgaacgaagaaagctcgagactccaatcccaggaaggcgacggcagcggcggcaaagatgaagcctccagcgcaggcggacgcgtgggc

SEQ ID NO: 1877 - DNA, 1587 bp, Homo sapiens
cgcctgcaggtaccggtccggaattcccgggtcgacccacgcgtccggggaattcactctgttttgcagaaaagattctgtggattaatacagaagcaccagcaacaccagaggggtggagactcctttctctcccgattctacagtctggctctaagcccagtaaaacagctcccgagcactgcttcagctgggtccagtcttgacaaaggcaggaagccagctagggtgggggcgatagggtcagcgggtatgtcccactgttggaggkcactggtattctgtttgtttttgttttgtttcgttttgttttttgagacagggtctcgttctgtcgcttagctggagtgcggtggcgtgatcatggcactgctattcttgaagcactccacccacctgggctactttttctttagtgcagaggtgcactgycttcttttargtgggatcgcgtaagcatgagctggtagagcacggagaggcaggcagccaggttacgaagactaagccaattattcactgaagtcatcctcctcycccccaccattcgatttgatctacctctaagccaggctgtgaagaaaaggaaggcactttagaagacctcagcagtgtggttctgtgtctacttccatgacctgtacctgagtatcttagccagccagccttaggaacaccaccaaggttactttgaaatctatgtatatagctagttacagacgggagctatgtgtttcttcattattttgcagctcctcgttgttcctgtgattcctgaacacctttttggaaatatgggtctctgtgagttttgagcacactactatcactttggatagtcactccatttatatttttataaacttccattagagaatcattaaggctgtttaatatctgctctggatattacgcattggctttttgttgcctagtgctacaaaccttcctgtgggactcagtgtcttcaggcaatgattgtgtatcctgttacagatggttgtgatacaagaagaaccactcttctttgaaaataaactcttggaagcttttgccagctatytggggggtaggaggaatattagcaactgtattggttgtctacagatacagaattgcctgttgtgagggaactgattgttttgttgggaaaagaaatttaccaggagaaagagttttgtgctgtattgtgagagatctcgcctctcagttaaatgagccctgggttaaagtcagtgtgaagggcagctgtgtgcgggcacgagccagagtgtctgcctcagactagatttgacttgagttctttatgacccaggactctggataatgtgaatttgctttcctatttaactagaagatacatgtactatagatcattgtctcattttagtgattgttccttaaactagtgaaactagtggatttctcttcttcctctttattttttgcatgttaaatgtgaaccttagtgtatttgtattttgtagaaaataatgaaaaattttaatggagaatgatttaaaaacatttacaatacattatttttgcatctgtaaaaaaaaaaaaaaaaaaaaaaagggcggccgc

SEQ ID NO: 1878 - DNA, 901 bp, Homo sapiens; identical to SEQ ID NO: 114
  misc_feature (8)..(8): n equals a,t,g, or c
  misc_feature (57)..(57): n equals a,t,g, or c
  misc_feature (68)..(68): n equals a,t,g, or c

SEQ ID NO: 1879 - DNA, 859 bp, Homo sapiens; identical to SEQ ID NO: 1330

SEQ ID NO: 1880 - DNA, 1308 bp, Homo sapiens; identical to SEQ ID NO: 1047

SEQ ID NO: 1881 - DNA, 264 bp, Homo sapiens
  misc_feature (52)..(52): n equals a,t,g, or c
cacttgatgtactgccaagtgggcagtttaccgtaaatactccacccattgncgtcaatggaaagtccctattggcgttactatgggaacatacgtcattattgacgtcaatgggcgggggtcgttgggcggtcagccaggcgggccatttaccgtaagttatgtaacgacatgcatctaatgcgtgaaagggcctcgtaatacgcctatttttataggttaatgtcatgataataatggtttcttagacgtcaggtggcactt

SEQ ID NO: 1882 - DNA, 8052 bp, Homo sapiens
cactactataggggattgggtacgggccccccctcgagtttttttttttttttyttggtgacatggcccacatccgctgagggcacctttattgtctgggacaggccctcagcccctcctgccccatccacccagacaagcaataaaagtggtctcctccctgtgcatgcttctgctttcagccccagcctcgtcacttgactgtgaggatcctctgggtgtcagggaagtcctcctccagcagtgagtcatcgaagggttcacaaaaggtgtcgctgccaaagacagggttggggacagagaccagggtggggttggtcccttcttgccacggtgagaagtcgtcatcagcatcatcttccgcctggaaggcagagaagccaaagcccrtgggcttgcctcgggcacggaggtagagagctccggccaccaagccaagcagtgctccagcggcaagcacagcccccacgcctgccgccacaggtggggcttcaggcgccagcactgcctggggctgtgggggtgccaggagggggctggccagagcatggatgatgccattgaaggccatgatgtcccacacaatgatacggctaaccacaactgtccctggggccacaggggcccaggaactgttgtcagggcctgcgtcactgatgatgaggctgaggcctgagtgggccggaagcaacttcccctggctggcgttggcacttaggagggtggcgttggaggcatgcagctccaagtctgggccactcagcgtcatgttgtccacaaagccttcattgacagggacgaagagtgtcttatacgtgagctcatcatccaggaagtccaggaagtcgagaccccgctgggtggcattggcatagcccaatagcatcccatagaaggtggagaagttggcagtggcagccagcacatccagcagcttcccattgcacgtgctgatcccgtcacccacgaagccatttcggcatcggcaggccacatcttgcacacggaagcagtaggcatcccagcgttctgagaggttcttgcgggcacccaggctgactatgcccacccgaccattgccacagtccgccacagggaaaaccacagggtgggcagtggagccattggccagccagcccatgaggcacaggtggaagcccagctgctgggcagcagagagctgagggaatgaagcaaggacggctccctgtgcttcgcatgccgcctcagcctccgaaaagttcagaccataagggccgctggtggcctggaggtggaaaacgccagcccgtttctcctggaagtgcaggtcagtgcacatggcatctgagtggcagggcggtggctggcccaagcagcggtccacaggtggttccgactcctccagacactgcagtccatcgcctacgtagcctgcgtggcactcacagcgccgtgtgttcaggccggtgctcaagcagttggcgtgctcgctgcagcccccgcggtggccatctgtgcaggggttgcgggcccggcagctccagccatcaccctcgtagtcgggcaggcaggtacaagtgaccattgttcctacctggctacagttggcgtgctcactgcagccaccatgcccgtcctggcacaggtctgccactgtacacacrcggccatccccttcatagcccaggctgcactcacagctgttgcctgcacggcacacagcctcgggtgcacagggtggggtacacacaggctgcagctccagttgcacctcacagcgtggcccagtccagccttcatcacagaagcaggagccagagcccccaaggccctcatcacagcggccatgcacagtgcagcggcaggcttgacaatggggcccaaaggcaccaggagcacagagttcacaggctgtcccagcaaaacctgaacggcacagacactgcccactgccactcatgccgtccatgcacacgccacggtcactacaagggctgctggggccgccagggcaagcttggcactcactgccatagtgaccagggcagcagctgggcttccaggtggtggtgacacaattgcggtggcagcccctgcccaggccttggggcctaccccaaaggctggggtggacccagacgctgcgtaatcccaaagagtgcagcggaggggacgtccagaacttcgggtagaagcgccagcaggcctcagggctgccctgctcctgtgacccctcaggacagggtggctccagcccacagatgctgcaggtgttcagtcgcaggggccgggtctcaaagtggtcacagcgagcaccaaggccaggtggctccagcagctggtcgatgccataggccaggccaccctcaaagggcaagtgccgctgcacaatgcgagcatcatcctcacccaccatgagctcaccgggccgcgttcggctgcaggagaaagagatgggggtcccatgcatggttcgaagtgggcccaggttgggcaggtcagatgccaaggcctcgacattgcgaatcatgtggccccgcagaatggctgctagcttgtcacggtggtcctcatggtacagccaggcctggcgatccggaggcagagctcgaaaggcggcgtctgtgggccacagcattgtgaagggcctatgggatgcctctcgaagcaggggcaggaggccggccaccttcaggaggccgctgaagatcttgtaaccgaagccctgggcggcggcggtgacatttctcctcgggatgggagcatcatcaggctcccagtgcagcgcctcggggggcagcaggacacggtcaatgaagtgcaggatgccgttcacggcctcatggtcgctgctcaccacgcgcgcgaagtcattgaggtatatgctgccctccctctcgctgaagcgcagtgggtgccctgagagggccgtggcgtacccctgctccagcaggtcctcgctccgcagccgccgacagccaaccacgtggtagcgaaacaccagctggcgatgcgcacgaatccgggccagctcatcctgcgacaggttgctcattagatctgcgtgcggcacgaagatggtgaaaggcccatcgcccttgagctccttatattccaggaggcggaggctgaagaatgaggcatgcttatccctcaggagctcctgggggggcgagggtcagctcagatttggggcggcccccattcagggcctggtgcctgtcccagcacctgcggcccaaggtcaggccgactcgggcacggcaggtgaggccgtcccccacggtgtgggctgtgtcgcaggtacatgtcctctggccatcccctgtgcttttgcaggtggcatatgggctgcatcctccattgttcttagagcaggggtccaggagctcgcaggtccggatgccatccccgctgtaaccctcacggcagctgcaggagacctgctgggggccagtggggatgcactcggcgtgaatgtggcagcccccgtggtggatgagacagctgttaatttcctggcacagctccccgtcgcccatgtagccatcctggcaggtgcatgtcckctgcccaggtgccaccttggtacagttggcatgaggggagcagcccccatggccgtgggcgcargggtccacctytgaacagaagatgccattgccggagtwtcccgcagcacaggcgcaggtgraggctccggccgagtcctgcacgcagttggcattggggtcgcacttcctagggcactgagggctggtgattttctggtcacagcggaggccctgccagcccacgttacagacacagcttccgtccccttgcagcccctcctggcacagcccatgggcacagtcacacactccggtgcagttgggcccgtagcggcccagctcacacacctcacaggccgttccatggaagccctcgtggcagtggcactccccgctgcccaggaacctgtcctggcactgcccatggcctgagcacaccccccctagaccccctgggcatggctcacacagcgtgccaaagaaaccagggcagcagtccggcacctggatcttcttggcacatgtgtaagagcagccccgggagaaggagaagccagatcggtagacacagctcttcctgggtgtgtcctgcagctggaagccctgagtgcagcggaatctcctggtgcagtttacacatttctcccgcagggcctcagcgtggctatgcaggcagcgacttgagcccaccgtcaggacccccgacagaccaatcagcgagcggccaggggcctccagcatggggccttccagtggcacatggttcacctcaggctggccactgtggttgtagaagacgatccagtgggcagggcccaggagggagttgcggtgtccacccttccgcagggtttccatggagagggcctcccccaggaccacatggtgccgcactgtgtctgcgtccaggtgactgctgttgccctgggcctccagggagcggttggtgggcacaaagatggtgtaggcagtggcagcctcaatctggggcaccaacccatggtgctgcagcaattcccggaagaggctgaaggcaggcaccaagtccagctgctgcagcaacccctgcccaccgggcacatcccctcgggggggcagtaagacctggctgaggatgtgtaggacaccgttggtggcaaggaggtcagccacatccacgctggcattctgcacccagaccctcccactaatgttgcgaatctcccagcgtgtggtggggttcagggtggccacttcctgcccacccagccgggccagctcctcctcgaagagggcaccctggagaaaatgggccctgaccaggttcggcagcgtccttggctgcagccagaaagctcggtcctcggggctcagctgacggactgcagcctcggagggcaccagggctgtgactcggcggtcggcaggaagcgtgatgccggcactcttaagccattggtagaagatggagaagtgggcatttgcctccagctcccggaagatgtctccataacagctgaagccatcacccccaaagccaggggggcacgtgcagacccgctgacctccccccactgcccggcaggtggccaggccgtggcagccgccattgcctgcccggcaggggtcgatggggctgcactggtagccatccccggcaaagcccagcttgcaggtgcatcggctctgcccggggcccacatagctgcagagggcatcggtgtggcagccacctctcacgtccagctcacactcgtcaatagccacacagacgcggccatccccactccagcctttgtggcatgtgcagtggtgggtgcccagggacccagggacacactcagcattctctgagcagcctccacggtccgggtgggagcaggggttgctaggtgtgcaggagaagccatcaccctcaaagccatcaagacagcgacatctggcaacaccctcctggctaacacagcgggcatgcaggtggcagtgctgggccagccctgtgggcccacagtcccccatggactcgttgcagaaccggccactgaagccaggggcacacgtgccctgctggcacacccccccactgcctgggcggttgtcgcagagaccatggacacagccgcagtcttcctggcattgctctccatgcttgtttgggttcgagcagatgtggcaggcgatgcccttgtagtctgggaagcagaggcaggccccattgccctggatcccatcactgcaattgcctttgccatagcaggggttggagaagcccccaggacactgcgtgcagtcaggcccgaaaaaacctttgcagcagccttgttccatgatggtttggttgcagtagctggcacagcccttctttagcacattgagccccgttgggtcatggatgtagacacactccttggggaagatgtccagcttcacactgttggggggacacgtgctggtgttcagggcttggcagtccacacaggagcccgccacaatcttgtgctgctcctcgctgcagtgcttgggcaggatgggcaggatggtcgggggcagcaggatgccgtccagcatgtggatcacrccattggcggccatcacgtctaccctctgcagcgggaccccctcgggtcccagcaggatgcgcccctcctcagaaatgttcacagccaggacctggttcgccatggtgaggatccgacccttggagatgagcttctcaacggtcagctggccgtggttgtagatgtggtaccgcaccaactcctgcagtttagagagacccgctgtgaagaggtagatcaggcggccgtcacgcaagctgtccacagcctcattgcttggggcaaagactgtgaagggcccaggtccgtccaggatggagggcagcccacagttctccaggatggtttcaaagcggctgaaggcctcggtagaggcgaggatctgtccgatagttctcttgggatccccaggggtcccagagggggcctgccaccgcaggccagtgaccacgtggaagacgccattagctgctatgttgttggccttgtagatgttgaacgtctgctggggctggtctttgtacttgtaggagtatttcgtgaattggttaaaggtgacggtgatctcctgcccggccagcgtccaccaccttcgtgtttgttgggtccttgtgtcctccaggatgtgctgccctgcgatgatgtgctgtctacagagctgctgggcaagggatgcattcatggtcctggaggagaaggaggagacggatggcaccagcacggtgaaagggcccgctgtggtaaggatttcccggcagccctggtccatcatggccacggcgaccctcagctgcaggaacacccggcctgtctgcgtggccttctgcacctcgtggagcaggtgtccgtagcaggcacgcccatcccccacctcgctttccctgcacacacagctggtcttcccatcagcggtcacctggcaagtggcagaccggtcgcaggagaagggggagcagaaggcgaagcagcccgcagaagcgttgctgttgatgctgaccaggcctggccggcaggtgcagaaggcctggcccggcttctggtacacacacaaagtagagttgctggggcagccaccaaggttgtcagtgcatgggtccttgggcagacacaccatcccatcgccatggtagttctcagggcagtgacactgagcctgccccttggggctcaccgagcactgggccagcagtgagcagggtgatggccagcaggggttgggggctcggcattcactgccctgctgtgtgtagccgggcaggcacctgcagctgggagcctctgcggagcactgggtgttctggggacagcgcagctcctggcagacgggcagctcttgatcacagtgggggccagtgtatccagcaaagcacaggcagcttccatccccacgtggcccatggttgcacactccgtgcacacagctgcacaccgattggcagtcaggcccgaaccggttggggtcttggcactcctggcaggctgagccgcggaagttttcctggcacacacaggtcccattcctgtccatgccatccaagcaggtcccgtggccattgcatggggtctcagcgcccccagggcattcatggcaccgggaaccccagtagccagggcagcaggccttctgcaccacttgcttccggcacttccgtctgcagccgctcatggacaccatagagccccccagctgtacttcgtagcggcagtcctgggttatctgatccgggagctcccgcagccagcctgagggacacgtctgcttcttgatggccgcgcacgaggtgcagggtacatgagtgacaaacgtggttttcacatcacagcctttgaacagcacctgccccctgacgaagctgaagcctgccaggcagaaggccaggaggcagagtgggaggaggccccggggccccgccatggctggtgggcacgctgtccaggacagagtcggggcgtagggaatgagctctaggaggcaggcc

SEQ ID NO: 1883 - DNA, 383 bp, Homo sapiens
ccgggtcgacccacgcgtccgggcagagatgtggttcgagattctccccggactctccgtcatgggcgtgtgcttgttgattccaggactggctactgcgtacatccacaggttcactaacgggggcaaggaaaaaagggttgctcattttgggtatcactggagtctgatggaaagagataggcgcatctctggagttgatcgttactatgtgtcaaagggtttggagaacattgattaaggaagcattttcctgattgatgaaaaaaataactcagttatggccatctacccctgctagaaggttacagtgtattatgtagcatgcaatgtgttatgtagtgcttaataaaaataaaatgaaaaaaaaaaaaaaaaaaaaa

SEQ ID NO: 1884 - DNA, 1187 bp, Homo sapiens
ccacgcgtccgggtcatggcgccccgaagcctcctcctgctgctctcaggggccctggccctgaccgatacttgggcaggctcccactccttgaggtatttcagcaccgctgtgtcgcggcccggccgcggggagccccgctacatcgccgtggagtacgtagacgacacgcaattcctgcggttcgacagcgacgccgcgattccgaggatggagccgcgggagccgtgggtggagcaagaggggccgcagtattgggagtggaccacagggtacgccaaggccaacgcacagactgaccgagtggccctgaggaacctgctccgccgctacaaccagagcgaggctgggtctcacaccctccagggaatgaatggctgcgacatggggcccgacggacgcctcctccgcgggtatcaccagcacgcgtacgacggcaaggattacatctccctgaacgaggacctgcgctcctggaccgcggcggacaccgtggctcagatcacccagcgcttctatgaggcagaggaatatgcagaggagttcaggacctacctggagggcgagtgcctggagttgctccgcagatacttggagaatgggaaggagacgctacagcgcgcagatcctccaaaggcacacgttgcccaccaccccatctctgaccatgaggccaccctgctgctgggccctgggcttctaccctgcggagatcacgctgacctggcagcgggatggggaggaacagacccaggacacagagcttgtggagaccaggcctgcaggggatggaaccttccagaagtgggccgctgtggtggtgccttctggagaggaacagagatacacatgccatgtgcagcacgaggggctgccccagcccctcatcctgagatgggagcagtctccccagcccaccatccccatcgtgggcatcgttgctggccttgttgtccttggagctgtggtcactggagctgtggtcgctgctgtgatgtggaggaagaagagctcagatagaaacagagggagctactctcaggctgcagtgtgagacagcttccttgtgtgggactgagaagcaagatatcaatgtagcagaattgcacttgtgcctcacgaacatacataaattttaaaaataaagaataaaaatatatctttttatagaaaaaaaaaaaaaaagg

SEQ ID NO: 1885 - DNA, 902 bp, Homo sapiens
  misc_feature (13)..(13): n equals a,t,g, or c
  misc_feature (876)..(877): n equals a,t,g, or c
  misc_feature (881)..(881): n equals a,t,g, or c
  misc_feature (883)..(883): n equals a,t,g, or c
  misc_feature (894)..(894): n equals a,t,g, or c
  misc_feature (902)..(902): n equals a,t,g, or c
cttcttcctccanatcacagcagcgaccacagctccagtgaccacagctccaaggacaacaaggccagcaacgatgcccacgatggggatggtgggctggggagacgccatctcaggatgaggggctggggcagcccctcgtgctgcacatggcatgtgtatctctgttcctctccagaaggcaccaccacagcggcccacttctggaaggttccatcccctgcaggcctggtctccacaagctctgtgtcctgggtctgttcctccccatcccgctgccaggtcagcgtgatctccgcagggtagaagcccagggcccagcacctcagggtggcctcatggtcagagatggggtggtgggcaacgtgtgcctttggaggatctgcgcgctgtagcgtctccttcccattctccaagtatctgcggagcaactccaggcactcgccctccaggtaggtcctgaactcctctgcatattcctctgcctcatagaagcgctgggtgatctgagccacggtgtccgccgcggtccaggagcgcaggtcctcgttcagggagatgtaatccttgccgtcgtacgcgtgctggtgatacccgcggaggaggcgtccgtcgggccccatgtcgcagccattcattccctggagggtgtgagacccagcctcgctctggttgtagcggcggagcaggttcctcagggccactcggtcagtctgtgcgttggccttggcgtaccctgtggtccactcccaatactgcggcccctcttgctccacccacggctcccgcggctccatcctcggaatcgcggcgtcgctgtcgaaccgcaggaattgcgtgtcgtctacgtacgccacggcgcatgwagcgggrctnnaggntnccgtttccccncccccccn

SEQ ID NO: 1886 - DNA, 2987 bp, Homo sapiens
ggggagaataaaggtctaagatgtgcgatagagggaagtcgcattgaattatgtgctgtgtagggatcgctggtatcaaatatgtgtgcccacccctggcatgagacaataaccctgataaatgcttcaataatattgaaaaaggaagagtatgagtattcaacatttccgtgtcgcccttattcccttttttgcggcattttgccttcctgtttttgctcacccagaaacgctggtgaaagtaaaagatgctgaagatcagttgggtgcacgagtgggttacatcgaactggatctcaacagcggtaagatccttgagagttttcgccccgaagaacgttttccaatgatgagcacttttaaagttctgctatgtggcgcggtattatcccgtattgacgccgggcaagagcaactcggtcgccgcatacactattctcagaatgacttggttgagtactcaccagtcacagaaaagcatcttacggatggcatgacagtaagagaattatgcagtgctgccataaccatgagtgataacactgcggccaacttacttctgacaacgatcggaggaccgaaggagctaaccgcttttttgcacaacatgggggatcatgtaactcgccttgatcgttgggaaccggagctgaatgaagccataccaaacgacgagcgtgacaccacgatgcctgtagcaatggcaacaacgttgcgcaaactattaactggcgaactacttactctagcttcccggcaacaattaatagactggatggaggcggataaagttgcaggaccacttctgcgctcggcccttccggctggctggtttattgctgataaatctggagccggtgagcgtgggtctcgcggtatcattgcagcactggggccagatggtaagccctcccgtatcgtagttatctacacgacggggagtcaggcaactatggatgaacgaaatagacagatcgctgagataggtgcctcactgattaagcattggtaactgtcagaccaagtttactcatatatactttagattgatttaaaacttcatttttaatttaaaaggatctaggtgaagatcctttttgataatctcatgccataacttcgtataatgtatgctatacgaagttatggcatgaccaaaatcccttaacgtgagttttcgttccactgagcgtcagaccccgtagaaaagatcaaaggatcttcttgagatcctttttttctgcgcgtaatctgctgcttgcaaacaaaaaaaccaccgctaccagcggtggtttgtttgccggatcaagagctaccaactctttttccgaaggtaactggcttcagcagagcgcagataccaaatactgttcttctagtgtagccgtagttaggccaccacttcaagaactctgtagcaccgcctacatacctcgctctgctaatcctgttaccagtggctgctgccagtggcgataagtcgtgtcttaccgggttggactcaagacgatagttaccggataaggcgcagcggtcgggctgaacggggggttcgtgcacacagcccagcttggagcgaacgacctacaccgaactgagatacctacagcgtgagctatgagaaagcgccacgcttcccgaagggagaaaggcggacaggtatccggtaagcggcagggtcggaacaggagagcgcacgagggagcttccagggggaaacgcctggtatctttatagtcctgtcgggtttcgccacctctgacttgagcgtcgatttttgtgatgctcgtcaggggggcggagcctatggaaaaacgccagcaacgcggcctttttacggttcctggccttttgctggccttttgctcacatgttctttcctgcgttatcccctgattctgtggataaccgtattaccgcctttgagtgagctgataccgctcgccgcagccgaacgaccgagcgcagcgagtcagtgagcgaggaagcggaagagcgcccaatacgcaaaccgcctctccccgcgcgttggccgattcattaatgcagagcttgcaattcgcgctttttcaatattattgaagcatttatcagggttattgtctcatgagcggatacatatttgaatgtatttagaaaaataaacaaataggggttccgcgcacatttccccgaaaagtgccacctgacgtctaagaaaccattattatcatgacattaacctataaaaataggcgtattacgaggccctttcacgcattagatgcatgtcgttacataacttacggtaaatggcccgcctggctgaccgcccaacgacccccgcccattgacgtcaataatgacgtatgttcccatagtaacgccaatagggactttccattgacgtcaatgggtggagtatttacggtaaactgcccacttggcagtacatcaagtgtatcatatgccaagtacgccccctattgacgtcaatgacggtaaatggcccgcctggcattatgcccaggacatgaccttatgggactttcctacttggcagtacatctacgtattagtcatcgctattaccatggtgatgcggttttggcagtacatcaatgggcgtggatagcggtttgactcacggggatttccaagtctccaccccattgacgtcaatgggagtttgttttggcaccaaaatcaacgggactttccaaaatgtcgtaacaactccgccccattgacgcaaatgggcggtaggcgtgtacggtgggaggtctatataagcagagctcgtttagtgaaccgtcagatcgcctggagacgccatccacgctgttttgacctccatagaagacaccgggaccgatccagcctccggactctagcctaggccgcgggacggataacaatttcacacaggaaacagctatgaccactaggcttttgcaaaaagctatttaggtgacactatagaaggtacgcctgcaggtaccggtccg

SEQ ID NO: 1887 - DNA, 1173 bp, Homo sapiens
gcagcgcaccgttttgaaggtcctagcccacctgggctggctcacgcgcacgactagccgctcccatacagcacgcccggactctgtcgtcgcttaaggccactcctattctacggctgacccctggtggtcacgtggatctgwtcgccacgcaagtctgggtccttcggcgattgaccggggtccttgctgttcgggagcctctcctaagctgcctgttcgcgcgagagtttggaggggcgggtttggggtcggtgtctgattggggctcgcaccgcagcacgctggagtcccgcttaggtaccagttagcgtcaggggagctgggtcaggcggtcgccgggacaccccgtgtgtggcaggcggcgaacgctctggagaatcccggacagccctgctccctgsgagcmgaggtggagcgaccccattacgctaaagatgaaaggctggggttggctggccctgcttctgggggccctgctgggaaccgcctgggctcggaggagccaggatctccactgtggagcatgcagggctctggtggatgaactagaatgggaaattgcccaggtggaccccaagaagaccattcagatgggatctttccggatcaatccagatggcagccagtcagtggtggaggtgccttatgcccgctcagaggcccacctcacagagctgctggaggagatatgtgaccggatgaaggagtatggggaacagattgatccttccacccatcgcaagaactacgtacgtgtagtgggccggaatggagaatccagtgaactggacctacaaggcatccgaatcgactcagatattagcggcaccctcaagtttgcgtgtgagagcattgtggaggaatacgaggatgaactcattgaattcttttcccgagaggctgacaatgttaaagacaaactttgcagtaagcgaacagatctttgtgaccatgccctgcacatatcgcatgatgagctatgaaccactggagcagcccacactggcttgatggatcacccccaggaggggaaaatggtggcaatgccttttatatattatgtttttactgaaattaactgaaaaaatatgaaaccaaaagtaaaaaaaaaaaaaaaaaaaaaaaaaaaaaaaaaaaaaaaaaaaaaaaaaaaaaaaaaaaagggcggcc

SEQ ID NO: 1888 - DNA, 884 bp, Homo sapiens; identical to SEQ ID NO: 482

SEQ ID NO: 1889 - DNA, 1272 bp, Homo sapiens
  misc_feature (971)..(971): n equals a,t,g, or c
attttcctgtctcagcctcccagctccaaggaggaggtagcacctgaaaacggcttctcttggcgcccttatctacatttccttgatgaaacaatgggtactcactgaagatgctggagatggcagtcgagattaatacacacgcctcgtctcactccagaacacaatgactcaaaaccgcacgacgtgtacttttggaaacagctccgcgggagagcacccgggacaatccccaaaccccgttgcccgcggggtggggccgcggacgtgcgccacgtcgtgtgcgtcccgggcgtgcgtgcggcctccagtgcgcgtgcgcgtgccctcctggggcgtgctcgcggctataaggggcggaggctgggcggcgttgctctgcgctctgcggctgacggcgcttttgtctccggtgagttttgtggcgggaagcttctgcgctggtgcttagtaaccgactttcctccggactcctgcacgacctgctcctacagccggcgatccactcccggctgttcccccggagggtccagaggcctttcagaaggagaaggcagctctgtttctctgcagaggagtagggtcctttcagccatgaagcatgtgttgaacctctacctgttaggtgtggtactgaccctactctccatcttcgttagagtgatggagtccctagagggcttactagagagcccatcgcctgggacctcctggaccaccagaagccaactagccaacacagagcccaccaagggccttccagaccatccatccagaagcatgtgataagacctccttccatactggccatattttggaacactgacctagacatgtccagatgggagtcccattcctagcagacaagctgagcaccgttgtaaccagagaactattactaggccttgaagaacctgtctaactggatgctcattgcctgggcaaggcctgtttaggccggttgcggtggntcatgctgtatctagcatttgggagggtgaggtgggtgatcactggggtccggagttcgggacagctcgcaattggaaccccatctctataaatccaacgtacgtggtgtggggcagaaggcggatccatctggagggagggggaattggttgacccggctggttgtgagcgatcctggggccagcggccaggagtctcaaaaaaaaacgcttgccggcgggttgtaaaaggccccggggggtgcccaggcactccaccgggggtccaccggccgtggccccgcgggggtgcgccgattct

SEQ ID NO: 1890 - DNA, 1828 bp, Homo sapiens
  misc_feature (1795)..(1795): n equals a,t,g, or c
  misc_feature (1802)..(1802): n equals a,t,g, or c
  misc_feature (1805)..(1805): n equals a,t,g, or c
  misc_feature (1811)..(1811): n equals a,t,g, or c
ggcacgagggattattacatgccgataaggtatgaattggagatgggatccaaaattactgtacttagtgtaatttttaagctaattacagggttggtggtgaatattttacttctgcaaaatgaaaacagcatttcatcagaagttgttttatggtctttcagacattttattgtatatctttggtgctttttgcccatgaagtatctcttttgtgtgtttgtgtgtatgtgtattgatctgctgtaaatttcacagcactcattgtcagggatcagcagaatcaggcctaggcagagagctgagcagtactctcagtacgtctctgtgtccttgttgccacattatctctgttgtttatttataagttggagaactctctgacctgtaacaaaggttggataggtcagagacaattgggagaggaatcctctgctctattgtcacctgtgcctcactccaaaatatgctctgaaatcaatatttaaatattaaatttgtatggtgaatgtatycttttttaawgttaattaaakgattggtcagcccacttaatatttacaatgcaggacttactttgcgtattctctgtcttgtatttttgctttatttaagctaggctagcctccaagctggaagctgaattgmcagttgaaaaataatgmcatgtatmcaaggtatgtttgaaggattgcagatgcaggggcaccatatgctaaaggagtgttggaagctcactgcagaagatgacaaaagcagactgatatgtattatttgctgaaatataagctggaggcacaggtgaagattgccaaacctaatgaacagtttggcaaataagacaggctgtcaggccatggcagttcamcagtgggcgtgctgcctgtgaaccaagtcatttgttccagaggactacacttaaataccacaaataaaatcttccttgtcactgatatcacagtgaaatagatgttgtctttcagatttctggttgaattaccagccattaacatctggtgatttgggttgtaaaattatttttagttttgcctgttcatatttcatccagaaagcccaaacaagatatattttcccacataagaatgtaagcagtataatgccccgtccgggagggaggcggggggcagcccccacctggccagccgccccttccaggagggaggtggggggcgcctctgcccggctgccccgtctgggatgtggggggggcccctctgcccggccgccaccccgtctgggaggtgtacccagcagctcattgagaacgggccatgatgacgatggcggttttgtcgagtggaaggaggggaagtgtggggaaaggaaaaagaaatcagattgttgctgtgtctgtgtagaaagaagtagacatgggagactccattttgttctgtactaagaaaaawtcttctgccttgggatgctgttaatctatrrccttacccccaaccccktgctctctgaaacgtgctgtgtccactcagggtwaartggattaagggcggtgcamsatgtgctttgttaaacagatgcttgaaggcagcatgctcsttragagtcatcaccactccctaatctcaartacccagggacacaaamactgcggaaggccgcrgggtcctctgcctaggaaaaccagagacccttgttcacwtgtttatctgctgaccttcyctccrctattgtcctatgaccctgccaaatcyccctctcsgagaaacacccaagaatgatcaataaatactaaaaaaaaaaaaaaaaatcgggggggggnccggtanccnaattgncccaaaggggcggttta

SEQ ID NO: 1891 - DNA, 5747 bp, Homo sapiens
  misc_feature (3192)..(3192): n equals a,t,g, or c
  misc_feature (5747)..(5747): n equals a,t,g, or c
aaaaaagaagaaagaaagaaaagagaaacataagctagactgaaacataggggcaacactttcactgtgcttttcaatccaaaataattttcctaagagcccactatgtaccacacactattgagcacttgggattaaaaaaaagttctccagaggctttccagtctagtgccatgtgtctcagtcttggtgctactggtattcggggcttcagaattatttgttggggattggtggggtggggagctttcctgtgcttcgtaggaggttcagcaacacctctggcttctaccaaatagataccagtaagcacatgcaccctcacagccagatgggacaatcagcaatgtcttcagccattgccaggggacagaatcatcctcgattgaaagcatctggtctaaggggaaagaccagtgtggaagtcagacaggaagtcactggcaggctagtatcctttggatgaacagtttacttactataagttgtcctggtcaaggcagctgggcagaaggcactggtkgggagggtgaaggggttcttagtaattctgcttctttagtctgtacctgaaacacagtcattgattttacccactgagtggcctttaggggaagtgtatcatttccctctccttcctctctccctctggcatatggctcagcatttcctcacccgtttcacatgagcagatttgacacgttgctctgtccccagacttgcataacagcaaaaagctttatgcagtctggatggattcacaaaattaagccagtgggcagcagagtaataatccgtcagcttaggtgatataaaaggtcttgattagcccaggataatatatagtacatgctgaaggccctcttattccacggtatttatttgccattgcaagtatcttcctactacttcattctagaatagacaagcaatgtttaatgtatgagtctgcatttcacaagatcagtgtaataaacttaaccacattttgtctttttacagatgaacacagtatagagcatgaatttttttcatcttctctggcgacagttttccttctcatctgtgattccctcctgctactctgttccttcacatcctgtgtttctagggaaatgaaagaaaggccagcaaattcgctgcaacctgttgatagcaagtgaatttttctctaactcagaaacatcagttactctgaagggcatcatgcatcttactgaaggtaaaattgaaaggcattctctgaagagtgggtttcacaagtgaaaaacatccagatacacccaaagtatcaggacgagaatgagggtcctttgggaaaggagaagttaagcaacatctagcaaatgttatgcataaagtcagtgcccaactgttataggttgttggataaatcagtggttatttagggaactgcttgacgtaggaacggtaaatttctgtgggagaattcttacatgttttctttgctttaagtgtaactggcagttttccattggtttacctgtgaaatagttcaaagccaagtttatatacaattatatcagtcctctttcaaaggtagccatcatggatctggtagggggaaaatgtgtattttattacatctttcacattggctatttaaagacaaagacaaattctgtttcttgagaagagaatattagctttactgtttgttatggcttaatgacactagctaatatcaatagaaggatgtacatttccaaattcacaagttgtgtttgatatccaaagctgaatacattctgctttcatcttggtcacatacaattatttttacagttctcccaagggagttaggctattcacaaccactcattcaaaagttgaaattaaccatagatgtagataaactcagaaatttaattcatgtttcttaaatgggctactttgtcctttttgttattagggtggtatttagtctattagccacaaaattgggaaaggagtagaaaaagcagtaactgacaacttgaataatacaccagagataatatgagaatcagatcatttcaaaactcatttcctatgtaactgcattgagaactgcatatgtttcgctgatatatgtgtttttcacatttgcgaatggttccattctctctcctgtactttttccagacacttttttgagtggatgatgtttcgtgaagtatactgtatttttacctttttccttccttatcactgacacaaaaagtagattaagagatgggtttgacaaggttcttcccttttacatactgctgtctatgtggctgtatcttgtttttccactactgctaccacaactatattatcatgcaaatgctgtattcttctttggtggagataaagatttcttgagttttgttttaaaattaaagctaaagtatctgtattgcattaaatataatatgcacacagtgctttccgtggcactgcatacaatctgaggcctcctctctcagtttttatatagatggcgagaacctaagtttcagttgattttacaattgaaatgactaaaaaacaaagaagacaacattaaaacaatattgtttctaattgctgaggtttagctgtcagttctttttgccctttgggaattcggcatggtttcattttactgcactagccaagagactttacttttaagaagtattaaaattctaaaattctattaatctctcattaayagtatttaatataaagattcttaaaattactgacgttatgaattggtttgatgcttttctcatgtacctcaatccttattttaaaataagatcaataacactattttcctaaatgttgtccttacctgccctacacatattcagaattgctatggcagattaagacatgtcaatggaagaggtcagaggagtaatattattggaaacagctgtaataggtgccataaaaagcaaacaaacaaaagtattttggttctttgcgaccacagctgtccccaaatatacagatgattcagcacttattttaaaatgaatctgggtattgctaatacccccaaattagcagtttttaattttaaaatacatgagaaatgggactttgtcttgkctccaaagcagtcatctaaaatctacacccccacgattagatgagktattactgagaagktattgsacccacmaaaaagctgcmatttttttccaaagatgncaaaagctagaaggccaggtcttctcaaagtaaaatacactgkgtattggggaaaaaagggtaagaggcataattaccaagktaggcatagtctgkcaagktgkatttagctattatcatggaatagtgktattccctgataatgaatgktggcatcataaccagaatgattattctcatctccatatcttcgkatttacatctaggaaatataaagcttawttatrgkgaacactgaragtggtctctytccaaggagtaaagtaaatatgccctggctaactagtgtaagtttgtattctacataattaaccattataagaagtcactgagtagatcctaacttaagggatatttgtttgtgtttgagtatttctcgtgtggtgtttctaagtttgaaaagtgttttataagcatagagcttatgtgtgctactggggacaaatgtctcattttaaaggaaagagggttttctgagatggcatgaaatgagtgaaatctatttattgcctgaaagctaaagtggaatatgaaggcaagtctttctgaacagagcagtcctgtcactgactaacccagggaaaggacagggaaaagctagaaagtgttttgaaaactcttctgcttaccttttgaattgggacattamcaaagtaaggaccatttatgtgactggcttcctttggttagttatgattcattcattaattaattcatcagatttatatagagcacctgccatgagccaggcattatactaggtgtttgggaaacattggtaaacaaaagcaaagatccctgcttttatggaacttaagatattctgagacactggatcatacattctagtgcagtcaccttattaaaacttaagattttgtgatgcaaacaaacagccagaagctacaaataatgtaaatgttatatttaaaaaatacaatttcaargaaatgacatttaaaccagttttaggaaagctgaagacaatactgcttttagagctttttaagatcagtttatattgctcttaaatgataatcctcagcttccaagtttttgtgaactcactttggtttatgtgtttgctacactcactgagaaattaaacaccttgcttgatttattgtaaaaaggaaaaaacaacagagccatacttaagcagtcttaaacttatttattaacgttatcttgagtctacagagaacagaaagctatctaagaggtagaaagctgtcaaatacctattatcaaactctgaattctcctataatatttcataaagctattataacaccttaataccttactgtcagtgtctgtttgcagcctttccacatttcttctacataattgaaacagtcttgatattcttttgccattgggactgcttgtcagacacacttcattgcagccttttattggctatttggaaaggaagcaaggggtacagtgggggcgcacacaggcctggagtctggttcattctccagaatagaaataaaaccccccagtctctgcctttaatgccttccatccagttgttttgctgtatctcatgccwmctttttaaaaaactgccttaattttctaatctttctcatccccaaacacatataatctagtgaatcacatcatttccttgcataactataaaagattatcctttcccaaaaagcctttttataagtgccacctaacacattcatgggctgcttccctgggccatctggtatatgatttatgaatttactcattttactatgaggattattagcaagtaaaattaggaaggttatcccaactcctaaaaaagttatacaaaaataaaatgatcttgtatcaagaataaaaataactattcactatttaggattattcacacacacacacaccytctatacaccactaaagcctcccattaaacccatagaagacttaaagagctaaaagaggctataatataaaaaaaaaaaaaraaaaggactaaattgggttgacttcacaatggtttgctgtcctgccccttggccatgacttccatccagcatctactcttagaatcagagtgtatactctgaaacagaagcagctctccccaagctggctgtcttctgccaagtctggaggttgcagctctgaaagagggtggtaccaggggccaacgcctggtgcagcctcaggagcaacaggaccataggctcctgaggaaattgtccaagagagccagagcaccagtgttctctgcagtatgacttgggcatttgtttagtctggatttcctgtgtaatcagtgttttcctctgggactgtaatagaaccagtctactctccaagaggcctttagccaaagctcataatgawargactagctattaattgtctactactttctgkctactatactaaacattttacgtatgccatctaatttaacargcctatctgctaggtactattaatccccttttgatagatgaagactttgagatttagagaggttaagccacttgccctggtcacgcagtgacaggtctgtctgggcttcctctcttccn

SEQ ID NO: 1892 - DNA, 698 bp, Homo sapiens
ccacgcgtccgcttatggtcaaaagagcagttttaataactttaaaagtacttcagatagacgcagaaaattggtgagtggttgaccaagaacactgcacaaatataaaaaaagttctggaaatgcagaatggcgttagatttatatttggtttgttaattttatatcactgtttttcactgtttttgtggacaaataatggttgctttgctgaagtgttcttcctcaatcttgattgccctgtacctacccaaaagctgtagtcacacatcctaaaggccaagcaaacccaccgggatggtggggggtcttggagccaagctcttaggttcctcttatttggggcagataccagtccataccagctgcgatttgtgagtggacctgtggtaagaagaatagaaaaggctctcagagataagtttttaacatgtgtaacaatcccaagatttcctagattaaaatcttaattgattttggaaattggattttgatttaggatcaaaattaggacaagaacagataacttcttcagatacatttgtgtaactttacagaatgtcatcaagctttggggctctgtggggcacatgatttatccataaaggagatgcagtatgcttacttaaattaataaatttaaaatcttttaaaaaaaaaaaaaaaaaaaaaaaaaaaaaaaaaaaaaaaaaaaaaaa

SEQ ID NO: 1893 - DNA, 1010 bp, Homo sapiens
  misc_feature (11)..(11): n equals a,t,g, or c
  misc_feature (21)..(21): n equals a,t,g, or c
aaggatgctcntcgctaaaancgtctgttttagktcatgactgtggscagagattaattggtgaaaaatgggcctgtttgtgggatttaccacacagtaaggtttctcatctgcctggaaaaatgtggaattagctctttgagaaatgcagtccggtcatgaggttgaagcgagagcttagggagggaaacacagttcactctctaaggcagttatgattggttagattccagagcagtccctttggtgtagtaaagttcttttcttctcgctttcaggtctgtgtttcctaatgttgctagtttcaccagtacttcacagatagcatcttattcggcttccttcaaggcctgctgatccaaactggggagtggtcttggagaggattcctagttctctccgctcccccatctagaaagtgctgttacagtgaaaaagccttcaatttgcaaagaccaattgcgacagcaaatctgtgctgtgtggaaggggatamaagttgtgaaccggcggatatgtatgacaagggtacaaaatggaaggcgagacgttagttcttcgcctgtgaagatggttcttgagcaacactcaagaagtgcagtggagtgctactagagtsaaytccacgtgcacgttcctccctaagagccactgcaaggatcctgggcctgctgcgtggcccaagaatccacgttgcttctgaggctagatctagccacagcgattagggtttcttcgccatggccttggtggtggctggccctaaactggtcacagtctgaagacccaccctgaaagggactaaggttagagacagcgcccctcccctcccacccttagctcagcatccccactaagcacaccccttggggaccacaaacgccctctttcccgaagaccccagtagtgacctgtgggattctggctgggtgtccgtgacttaccctcaaagagaacctgcacgcctggggtcccaggatggctggcttgcccctcccgtccgaagatga

SEQ ID NO: 1894 - DNA, 645 bp, Homo sapiens
  misc_feature (37)..(37): n equals a,t,g, or c
  misc_feature (49)..(49): n equals a,t,g, or c
  misc_feature (53)..(53): n equals a,t,g, or c
  misc_feature (66)..(66): n equals a,t,g, or c
  misc_feature (70)..(70): n equals a,t,g, or c
gctcgaaatttaccccttaacttaaggggaacaaaangttggagcttcnaacngcgttggcggccngctnttagaattagtgaatccccccgggcttgcaggaattcggcacgaggcactgggcattcagaaaaggttctccccggaggtgctgggcctgtgtgcaagcacagcgctggtgtgggtggtgatggaggtgctggccctgctcctgggcctctacctggccaccgtgcgcagtgacctgagcacctttcacctgctggcctacagtggctacaaatacgtgggaatgatcctcagtgtgctcacggggctgctgttcggcagcgatggctactacgtggcgctggcctggacctcatcggcgctcatgtacttcattgtgcgctctttgcggacagcagccctgggccccgacagcatggggggccccgtcccccggcagcgtctccagctctacctgactctgggagctgcagccttccagcccctcatcatatactggctgactttccacctggtccggtgaccccctggccccagatggcactgagtttttcattcattgaagatttgatttccttgaaaaaaaaaaaaaaaaaaaaaactcgagggggggtcckgtmccaattcgccctatag

SEQ ID NO: 1895 - DNA, 2796 bp, Homo sapiens; identical to SEQ ID NO: 1536

SEQ ID NO: 1896 - DNA, 1134 bp, Homo sapiens
gatgacgccacggacatggtggccgagaccggcggcacgaggggacgtgtcgcgcggccgggtggcctcggtcggtaccctgggcgcggagcagctgcctcattagtattcgtacccacgaggcggcgcaccgggccctcggggacagcgagcgtcgcggccatggcttatcactcgggctacggagcccacggctccaagcacagggcccgggcagccccggatccccctcccctcttcgatgacacaagcggtggttattccagccagcccgggggatacccagccacaggagcagacgtggccttcagtgtcaaccacttgcttggggacccaatggccaatgtggctatggcctatggcagctccatcgcatcccatgggaaggacatggtgcacaaggagctgcaccgttttgtgtctgtgagcaaactcaagtatttttttgctgtggacacagcctacgtggccaagaagctagggctgctggtcttcccctacacacaccagaaaaggttctccccggaggtcgtgatgctcctctgcccccccggggaagacctcaacgcccctgacctctatatccccacgatggccttcattacttacgtgctcctggctgggatggcactgggcattcagaaaaggttctccccggaggtgctgggcctgtgtgcaagcacagcgctggtgtgggtggtgatggaggtgctggccctgctcctgggcctctacctggccaccgtgcgcagtgacctgagcacctttcacctgctggcctacagtggctacaaatacgtgggaatgatcctcagtgtgctcacggggctgctgttcggcagcgatggctactacgtggcgctggcctggacctcatcggcgctcatgtacttcattgtgcgctctttgcggacagcagccctgggccccgacagcatggggggccccgtcccccggcagcgtctccagctctacctgactctgggagctgcagccttccagcccctcatcatatactggctgactttccacctggtccggtgaccccctggccccagatggcactgagtttttcattcattgaagatttgatttccttgaaaaaaaaaaaaaaaaaaaaaaaaaaaaaaaaaa

SEQ ID NO: 1897 - DNA, 1315 bp, Homo sapiens
  misc_feature (77)..(77): n equals a,t,g, or c
  misc_feature (796)..(796): n equals a,t,g, or c
  misc_feature (800)..(800): n equals a,t,g, or c
  misc_feature (1284)..(1284): n equals a,t,g, or c
gttatataccttgtatatcgctgcttagcacaggagtgaaaatggcacttgtgaaaaaatggataaggatctaccanaggttgaagaatgccaagggaaaaaaaaagttaattcctggacgccaaagagaatttgaaagaaggaaatgttcacagtgtctcatgctctagagaaatcaaggaagataaaaactgaattctttaataagttgggctaatgggtagtcattgtggcccaktgaagaggtgatagcagccagatgctacagattgagaagtgaatgagatgggcttgaggaaggaataacagatcatcataaactattttgtcaagaaactttgatgtgaaagaaaaagaaaatggaagagagtcatgtggttagtaagggtttttaaaatgggaaaaacttgagcatgtttattgtgcccaaggtaagagccattagaaagtaaaagagagaaaggataggttattggatagtgcaagtcccagagctggccagagratttgaggattagcctggggtttaaagagaaagctctccctttcacagaagtgagtgggaagaaaggaaagaatgctaaagatactgctaggtttgaggtgtggtagagagcacttggagtgagagaactgactgttggggattctcttttctatgaattgcccagacgaggatatgaaagagaagatggagcaaagggaacgggcctgccaagtctcagtaaggttgtcgttgctgctgttgttgttgttaagtgcagtggaattaagagaatgagagaactaaagaaanaagntactatwgttagtgaaataatcaaaatgttgatggtgaggactaagcagttagatttaattgcctggttttccatttattttctctagatttaagtgttaaattcaatatacagtaatctgtacttcaaaagtttgtttcttgcttttctaagggcagtactaaataataataacaataataatccttgctaaaatttatgaattcttactctatgtcatgcaccatgtagatttttcacatatataatctgtttaacaaccctgggaagttcatattattatctccattttacatatggtgaaactgaggcttagagcagttaaataaattgcttaagatcatatggcttgttggtggcagatctggaattttctaactcagaaccctgcttttagctggacatggtagtacatgcgtgtaatcccagctactcactcaggargytgaggtgggaggatcacttgatcccaggagtttgagancaacctargcaaarararacccatcttaaaa

SEQ ID NO: 1898 - DNA, 2077 bp, Homo sapiens
  misc_feature (429)..(429): n equals a,t,g, or c
  misc_feature (437)..(437): n equals a,t,g, or c
  misc_feature (932)..(932): n equals a,t,g, or c
tttttggaagcgttatcagtcctatttggttagtgagaaccatgttccccttattcccgctaagttgctgctgtttactaccttagattctcatttgttttctctttctttcctctccttccacattaattattagaacataagttgatcaggaaaattaaatgagactttagtattttggcacttcctaattgacaccttgggagactgcaggaagggaaagagaatcaatgatcagttatttgtgtgtgtgtgtggtttttttttttttttggaagacagagtctcacacttttgcccaggctggagtgcagtggcgtgatctcggctcactgcaacctctgcctccagggttcaagcgattctcttgcctcagcttcccgagtagctgggattacaggcacacgccacaacgcctggctaattttnatattttnagtagagacagggtttcaccatgttggccaggctgttcttgaactcctgacataaggtaatccacccggcctcarcctcccaaagtgctgggattaccaggcgtgargcactgarcctggcctatttgtggtttttttttggttttgtttttgtttttgtttttgagacggagtcttgctctgtcgcccaggctagagtgcagtggcgcgatctcggctcactgcaacctccgcctcccagattcacaccattctcctgcctcagcctcccgagtagctgggattacaggtgcccaccaccacgcccagctaattttttgtatttttagtagagacggggtttcaccatgttagccaggacggtctccatctcctgacctcgtgatccacctgcctcggcctcccaaactatttgtgtgtttttttttttttttgagacggagtctcgctctgtcgcccaggctggagtgcagtggcgctatctcggctcactgnaagctccgcctcccgggttcacgccactctcctgcctcagcctccttagtagctgggactacaggcgcccgscaccatgcctggctaatttttttgtatttttagtagagacggggtttcaccgtgtttgacaggatggtctcgatttcctgacttcgtgatccgcccgcctcggcctcccaaagtgctgggattacaggcgtgagccaccgcgcccggcactatttgtgtttttaacaccattctcccccacttctctcctgggtgacataagagagaaataacctgtagtacagcagctaaagtattctcctttcagagaatttttttggaggtctctaatatatatttcccccttgtctctgtgatctcttatttatactatattattgtcccatgtactttctaaactgagcttggaacatttagtattcctgcaattggacttcccacttaacaattatacagactttgcttttagaaatagattaggttccaaacagaaagttcaagtgtaacaacaacaataaaaatagattatgaaacaggctataattggctcttttggatttgataggggcaagatgaaaggcaactttcttgcttttgaaatcatgttgggtaagaggtaaggaatccagctacaattttattagtgcttgaaacgggcttccttgaattctccaggccctatcattttttttttcttactaatcagaagagagctggggtagaagccccatgtttgtattccatgaaacacgtcgggttggagtaaaggcaaaaacagctagacacaccaggtgtgtctgtttgacatttataagctggcactcatcaacactcctgtttctcctttctctgggacgtgtggattaaggggtgtgagttgtgggaagaattgccctcgtacctcctggatttattatttttctcaaataccaaccagtaagatcccaaataacttgagaaaaattgtttcctgatctgtccacttctggtgtcaaagattttactcatcttcttagtacattctatgtattttatatgtataattttatacaattaaaaatagatttttgtctagtgaaaaaaaaaaaaaaaaaaaaaaaaacggacgcgtgggtcgaccgggaatcccgtac

SEQ ID NO: 1899 - DNA, 1075 bp, Homo sapiens
acggctgcgagaagacgacagaaggggagtgttagactgaagataaagtaagtgctgtttgggctaacaggatctcctcttgcagtctgcagcccaggacgctgattccagcagcgccttaccgcgcagcccgaagattcactatggtgaaaatcgccttcaatacccctaccgccgtgcaaaaggaggaggcgcggcaagacgtggaggccctcctgagccgcacggtcagaactcagatactgaccggcaaggagctccgagttgccacccaggaaaaagagggctcctctgggagatgtatgcttactctcttaggcctttcattcatcttggcaggacttattgttggtggagcctgcatttacaagtacttcatgcccaagagcaccatttaccgtggagagatgtgcttttttgattctgaggatcctgcaaattcccttcgtggaggagagcctaacttcctgcctgtgactgaggaggctgacattcgtgaggatgacaacattgcaatcattgatgtgcctgtccccagtttctctgatagtgaccctgcagcaattattcatgactttgaaaagggaatgactgcttacctggacttgttgctggggaactgctatctgatgcccctcaatacttctattgttatgcctccaaaaaatctggtagagctctttggcaaactggcgagtggcagatatctgcctcaaacttatgtggttcgagaagacctagttgctgtggaggaaattcgtgatgttagtaaccttggcatctttatttaccaactttgcaataacagaaagtccttccgccttcgtcgcagagacctcttgctgggtttcaacaaacgtgccattgataaatgctggaagattagacacttccccaacgaatttattgttgagaccaagatctgtcaagagtaagaggcaacagatagagtgtccttggtaataagaagtcagagatttacgatatgactttaacattaaggtttatgggatactcaagatatttactcatgcatttactctattgcttatgctttaaaaaaaaaaaaaaaaaa

SEQ ID NO: 1900 - DNA, 642 bp, Homo sapiens
  misc_feature (21)..(21): n equals a,t,g, or c
acccggccaagacgctcagcngccggtcccctgggccgccacacgcagctgagacctgargratctggrattrccctggcctgaagtgccctcmttcatacccactgktctgaaggctkgaaacaaacattccacaacattggcttgrtgtgatcatcatctcataactgagcaagaagactatgcaaatcttagggcgctcgctccctgcacacggaaagaactctgtttaaatgctcagttcagaacactttgggccacatagtgattttgggaaaacaggataatcgtggtgtaaatgagtgtttcctttcaaagtccactgcagagcttttatccatatggtatgcacatgtagccaatattggtttctttttcttaatatatatattttattttaaaacaacaaaaagggagggcrttgacaccattccccacagagatagtcatgctgagtgtgggttgtttaaacatgcatattgaaataacacatatagtaacgtgggaatactaaaaaataaccaagattttatatttttgtaaattatactttctatactgtagattgtgtatgttatgtgtttttatggaaagctaataaattaaaggtacagtggtatcttgaaaaactgaaaaaaaaaa

SEQ ID NO: 1901 - DNA, 267 bp, Homo sapiens
  misc_feature (5)..(5): n equals a,t,g, or c
ttgcnacgggatattgacaatctcaaccttaattcctcacctgtgcactgaggattccaaagggcgccctcatcagtttcatgtgaggattacacgaaaggagggaaccaaascgggggaggaggatggtcctgaaagtgtggatcggtgggtgtttgctcctccagccctgggtgggagaccctcaggagcacgagcgagaacttcacarcctgtggtctctccttccctcacagaagtggtcgaccagaaggccgtgtatttctt

SEQ ID NO: 1902 - DNA, 2489 bp, Homo sapiens
ctaccggaacaaagctggagctccaccgcggtggcggccgctctagaactagtggatcccccgggctgcaggaattcggcacgagagcaaaaccaggtgcttgcgctgagggctctgcagtggctgggaggaccccggcgctctccccgtgtcctctccacgactcgctcggcccctctggaataaaacacccgcgagccccgagggcccagaggaggccgacgtgcccgagctcctccgggggtcccgcccgcgagctttcttctcgccttcgcatctcctcctcgcgcgtcttggacatgccaggaataaaaaggatactcactgttaccattctggctctctgtcttccaagccctgggaatgcacaggcacagtgcacgaatggctttgacctggatcgccagtcaggacagtgtttagatattgatgaatgccgaaccatccccgaggcctgccgaggagacatgatgtgtgttaaccaaaatggcgggtatttatgcattccccggacaaaccctgtgtatcgagggccctactcgaacccctactcgaccccctactcaggtccgtacccagcagctgccccaccactctcagctccaaactatcccacgatctccaggcctcttatatgccgctttggataccagatggatgaaagcaaccaatgtgtggatgtggacgagtgtgcaacagattcccaccagtgcaaccccacccagatctgcatcaatactgaaggcgggtacacctgctcctgcaccgacggatattggcttctggaaggccagtgcttagacattgatgaatgtcgctatggttactgccagcagctctgtgcgaatgttcctggatcctattcttgtacatgcaaccctggttttaccctcaatgaggatggaaggtcttgccaagatgtgaacgagtgtgccaccgagaacccctgcgtgcaaacctgcgtcaacacctacggctctttcatctgccgctgtgacccaggatatgaacttgaggaagatggcgttcattgcagtgatatggacgagtgcagcttctctgagttcctctgccaacatgagtgtgtgaaccagcccggcacatacttctgctcctgccctccaggctacatcctgctggatgacaaccgaagctgccaagacatcaacgaatgtgagcacaggaaccacacgtgcaacctgcagcagacgtgctacaatttacaagggggcttcaaatgcatcgaccccatccgctgtgaggagccttatctgaggatcagtgataaccgctgtatgtgtcctgctgagaaccctggctgcagagaccagccctttaccatcttgtaccgggacatggacgtggtgtcaggacgctccgttcccgctgacatcttccaaatgcaagccacgacccgctaccctggggcctattacattttccagatcaaatctgggaatgagggcagagaattttacatgcggcaaacgggccccatcagtgccaccctggtgatgacacgccccatcaaagggccccgggaaatccagctggacttggaaatgatcactgtcaacactgtcatcaacttcagaggcagctccgtgatccgactgcggatatatgtgtcgcagtacccattctgagcctcgggctggagcctccgacgctgcctctcattggcaccaagggacaggagaagagaggaaataacagagagaatgagagcgacacagacgttaggcatttcctgctgaacgtttccccgaagagtcagccccgacttcctgactctcacctgtactattgcagacctgtcaccctgcaggacttgccacccccagttcctatgacacagttatcaaaaagtattatcattgctcccctgatagaagattgttggtgaattttcaaggccttcagtttatttccactattttcaaagaaaatagattaggtttgcgggggtctgagtctatgttcaaagactgtgaacagcttgctgtcacttcttcacctcttccactccttctctcactgtgttactgctttgcaaagacccgggagctggcggggaaccctgggagtagctagtttgctttttgcgtacacagagaaggctatgtaaacaaaccacagcaggatcgaagggtttttagagaatgtgtttcaaaaccatgcctggtattttcaaccataaaagaagtttcagttgtccttaaatttgtataacggtttaattctgtcttgttcattttgagtatttttaaaaaatatgtcgtagaattccttcgaaaggccttcagacacatgctatgttctgtcttcccaaacccagtctcctctccattttagcccagtgttttctttgaggaccccttaatcttgctttctttagaatttttacccaattggattggaatgcagaggtctccaaactgattaaatatttgaagagaaaaaaaaaaaaaaaaaaaaaaaaaaaaaaa

SEQ ID NO: 1903 - DNA, 2057 bp, Homo sapiens
ggcacgagtgccgaaccatccccgaggcctgccgaggagacatgatgtgtgttaaccaaaatggcgggtatttatgcattccccggacaaaccctgtgtatcgagggccctactcgaacccctactcgaccccctactcaggtccgtacccagcagctgccccaccactctcagctccaaactatcccacgatctccaggcctcttatatgccgctttggataccagatggatgaaagcaaccaatgtgtggatgtggacgagtgtgcaacagattcccaccagtgcaaccccacccagatctgcatcaatactgaaggcgggtacacctgctcctgcaccgacggatattggcttctggaaggccagtgcttagacattgatgaatgtcgctatggttactgccagcagctctgtgcgaatgttcctggatcctattcttgtacatgcaaccctggttttaccctcaatgaggatggaaggtcttgccaagatgtgaacgagtgtgccaccgagaacccctgcgtgcaaacctgcgtcaacacctacggctctttcatctgccgctgtgacccaggatatgaacttgaggaagatggcgttcattgcagtgatatggacgagtgcagcttctctgagttcctctgccaacatgagtgtgtgaaccagcccggcacatacttctgctcctgccctccaggctacatcctgctggatgacaaccgaagctgccaagacatcaacgaatgtgagcacaggaaccacacgtgcaacctgcagcagacgtgctacaatttacaagggggcttcaaatgcatcgaccccatccgctgtgaggagccttatctgaggatcagtgataaccgctgtatgtgtcctgctgagaaccctggctgcagagaccagccctttaccatcttgtaccgggacatggacgtggtgtcaggacgctccgttcccgctgacatcttccaaatgcaagccacgacccgctaccctggggcctattacattttccagatcaaatctgggaatgagggcagagaattttacatgcggcaaacgggccccatcagtgccaccctggtgatgacacgccccatcaaagggccccgggaaatccagctggacttggaaatgatcactgtcaacactgtcatcaacttcagaggcagctccgtgatccgactgcggatatatgtgtcgcagtacccattctgagcctcgggctggagcctccgacgctgcctctcattggcaccaagggacaggagaagagaggaaataacagagagaatgagagcgacacagacgttaggcatttcctgctgaacgtttccccgaagagtcagccccgacttcctgactctcacctgtactattgcagacctgtcaccctgcaggacttgccacccccagttcctatgacacagttatcaaaaagtattatcattgctcccctgatagaagattgttggtgaattttcaaggccttcagtttatttccactattttcaaagaaaatagattaggtttgcgggggtctgagtctatgttcaaagactgtgaacagcttgctgtcacttcttcacctcttccactccttctctcactgtgttactgctttgcaaagacccgggagctggcggggaaccctgggagtagctagtttgctttttgcgtacacagagaaggctatgtaaacaaaccacagcaggatcgaagggtttttagagaatgtgtttcaaaaccatgcctggtattttcaaccataaaagaagtttcagttgtccttaaatttgtataacggtttaattctgtcttgttcattttgagtatttttaaaaaatatgtcgtagaattccttcgaaaggccttcagacacatgctatgttctgtcttcccaaacccagtctcctctccattttagcccagtgttttctttgaggaccccttaatcttgctttctttagaatttttacccaattggattggaatgcagaggtctccaaactgattaaatatttgaagagaaaaaaaaaaaaaaaaaaaaaaaaa

SEQ ID NO: 1904 - DNA, 333 bp, Homo sapiens
ggcacgagtacattttagaataatcttatctatgtttacaaaaaaactttgctaggatattggcaggaactgcattcaacttatagattaatttgaagtgaattgacctttataataagttgaggttttgattcatgaacatggtatgtctatttattatagttaggtcttctttgatttatttctctctttcttcttcttctactcctctctcttgctgcccctcctcctcctcctccttctccttccccttctcctactccttcatcttcatcttcttctttttacaagaccaggtctccttctgccaccctgstggagtgcagtggtgca

SEQ ID NO: 1905 - DNA, 277 bp, Homo sapiens
agatataactcacaacataaaattcacccatttaaaatatgcaactcaacggtttttactatattcacaaggttgtgtaaaaccgtcacaattttagaacattttcatcaccccaaaaagaaaccccatacccattagcagtcactccctatttccctccaacctccccagccccaatcaaccactaatctattttctatctatatggatttgtctattcttaacatccatataaattcttgacatatcataaaaaaaaaaaaaaaaaaaactcgta

SEQ ID NO: 1906 - DNA, 1304 bp, Homo sapiens
  misc_feature (131)..(131): n equals a,t,g, or c
ggggggaaggggagggaaarggtgaattgsgtaccgggccccccctcgagtttttttttttttttttttttatgtagaaaaatgtctttattttagggtatgtcaagttataacaccaaaaagaaactagnggtgaagtgtcatgatttttgcaacttattttcaaatggtttagcaaaacaagatatattttaaaagttataatattttatatagaaacacatacaaagagaggagagagaaagcaaatgtgacacaatattaacaatgattaatattgtggtgaaagatatatagatgttcattgtaccattcttttaacttctctgtaagtttggaaaactataattaaaaagttgggagaagttatatctatatgctcctcttaaaatattatatgaagatatacactatcattattattattatttttagagacagggtctcattctgtcacccaggctgctcactgcaacytcaaacttytyccagactcaagtgatcctcccacctcaacctcccatgtggctgggattataggcaagtactaccatgccgggccaattttttttttgtttgtagaaatgaggtcttgctatgttgcccaggctggtctcaaactcctggtctcaagcgatcctcctgcctcagcctcccgaagtgctgggataaaaggtgtgaaccaccatacccagccagtattatcttttcatttcattttccagttgagtatattattggctacatttgcataccgcacaattgttcattttttaaaaaccaatattttgttttgttctgttgtctacaataaggagaattcagatgataaacttacaaccaatcatggccaagtccacttgaggaattgtctctgtagatttatctgtagactctctaataaggagttttatggccgtatgtttcgtgtttcccctgatgtgccctgttactgttcctcttgccatggtgtttcttcctgtggcaaacatttcctttaccatttttcttggcagcttgcactttcatccactgcttaacagtatggttgtgcgggctgacacagattcttctgcgcttgacatgaaggatgacagcagccaagtcacaatccccatcagctctctggatgcgacacatattcactctttccaggagccttctggaaatatgatgtgaaacctccgtgcaacagctggaggcaatgggaagtatggctggtgaggaggcttctttaaggccgtggacggttcctacccgcgcgcggagaggaccgacgtgaagaagctgccaaagctcgtgcc

SEQ ID NO: 1907 - DNA, 126 bp, Homo sapiens
  misc_feature (57)..(57): n equals a,t,g, or c
taaatcatcaaagaatgcaatttccatatcctaatgattcaatctcccttaccctgnccaatcagtggcccaaattttccagccccttgcctcccagaaccccagcccagaactcttcagagattt

SEQ ID NO: 1908 - DNA, 304 bp, Homo sapiens
  misc_feature (304)..(304): n equals a,t,g, or c
gtacatagtactccatactcctttccttttcctcctattgaaactgttcctataaactttataaaattaatcagagaagaagagagggtgagaaacataaataatccaagcttgcaccacattcagcattaatcactaggtcactttgcttgctgaccccttcctcatagttgtttggctattgcttcagaattatgtggagtctgttacaagattatagttccccttaactgctctatagataacagcttgaacattatgaaatgctaagttttsccttcgagacatwctttcaggtgaggcn

SEQ ID NO: 1909 - DNA, 697 bp, Homo sapiens
  misc_feature (646)..(646): n equals a,t,g, or c
  misc_feature (661)..(661): n equals a,t,g, or c
  misc_feature (687)..(687): n equals a,t,g, or c
  misc_feature (695)..(695): n equals a,t,g, or c
cctgatcgaacagcctcacttgtgttgctgtcagtgccagtagggcaggcaggaatgcagcagagaggactcgccatcgtggccttggctgtctgtgcggccctacatgcctcagaagccatacttcccattgcctccagctgttgcacggaggtttcacatcatatttccagaaggctcctggaaagagtgaatatgtgtcgcatccagagagctgatggggattgtgacttggctgctgtcatccttcatgtcaagcgcagaagaatctgtgtcagcccgcacaaccatactgttaagcagtggatgaaagtgcaagctgccaagaaaaatggtaaaggaaatgtttgccacaggaagaaacaccatggcaagaggaacagtaacagggcacatcaggggaaacacgaaacatacggccataaaactccttattagagagtctacagataaatctacagagacaattcctcaagtggacttggccatgattggttgtaagtttatcatctgaattctccttattgtagacaacagaacaaaacaaaatattggkttttaaaaaatgaacaattgtgcggtatgcaaatgtagccaataatatactcaactggaaaatgaaatgaaaagataatactggytgggntatggggtyacaccntttatcccasactttcggaggcttangcagrganga

SEQ ID NO: 1910 - DNA, 540 bp, Homo sapiens
acagcctcacttgtgttgctgtcagtgccagtagggcaggcaggaatgcagcagagaggactcgccatcgtggccttggctgtctgtgcggccctacatgcctcagaagccatacttcccattgcctccagctgttgcacggaggtttcacatcatatttccagaaggctcctggaaagagtgaatatgtgtcgcatccagagagctgatggggattgtgacttggctgctgtcatccttcatgtcaagcgcagaagaatctgtgtcagcccgcacaaccatactgttaagcagtggatgaaagtgcaagctgccaagaaaaatggtaaaggaaatgtttgccacaggaagaaacaccatggcaagaggaacagtaacagggcacatcaggggaaacacgaaacatacggccataaaactccttattagagagtctacagataaatctacagagacaattcctcaagtggacttggccatgattggttagtctcactctgtcacacaggctggagggcagttggcgggattcggttcacc

SEQ ID NO: 1911 - DNA, 1394 bp, Homo sapiens
tcctgatcgaacagcctcacttgtgttgctgtcagtgccagtagggcaggcaggaatgcagcagagaggactcgccatcgtggccttggctgtctgtgcggccctacatgcctcagaagccatacttcccattgcctccagctgttgcacggaggtttcacatcatatttccagaaggctcctggaaagagtgaatatgtgtcgcatccagagagctgatggggattgtgacttggctgctgtcatccttcatgtcaagcgcagaagaatctgtgtcagcccgcacaaccatactgttaagcagtggatgaaagtgcaagctgccaagaaaaatggtaaaggaaatgtttgccacaggaagaaacaccatggcaagaggaacagtaacagggcacatcaggggaaacacgaaacatacggccataaaactccttattagagagtctacagataaatctacagagacaattcctcaagtggacttggccatgattggttagtctcactctgtcacacaggctggagggcagtggcgggatctcggttcaccccaacctttgcctcacgggttcaagggattctcgtgcctcagccttccaagtggctgggattgcaggtgtgcgccagtgcgcctggctggttttggtattttttgttacagacggggtttcaccgtgttggctgggctggtctcgaacttctgatctcaagtgatccatctgccttggcctcccagggtgctgggattacaggcatgagccactgcacctggcctacgtattaggctttatgtaagatgtacatagtactccatactcctttccttttcctcctattgaaactgttcctataaactttataaaattaatcagagaagaagagagggtgagaaacataaataatccaagcttgcaccacattcagcattaatcactaggtcactttgcttgctgaccccttcctcatagttgtttggctattgcttcagaattatgtggagtctgttacaagattatagttccccttaactgctctatagataacagcttgaacattatgaaatgctaagttttcccttcgagacattctttcaggtcctgcatactgatgaaactactgatgtcagctggtctgaaggaccctaccagaagctaaatcatcaaagaatgcaatttccatatcctaatgattcaatctcccttaccctgaccaatcagtggcccaaattttccagccccttgcctcccagaaccccagcccagaactcttcagagatttaagaatctcctcctacctcctgactcagcaccatgtaatcattaaactctctgctgcaaaaaaaaaaaaaaaaaaaaaaaaaaaaaaaaaaaaaaaaaaaaaaaaaaaaaaaaaaa

SEQ ID NO: 1912 - DNA, 2850 bp, Homo sapiens
  misc_feature (1790)..(1790): n equals a,t,g, or c
  misc_feature (1824)..(1824): n equals a,t,g, or c
  misc_feature (2847)..(2848): n equals a,t,g, or c
aatctccatgtggaccgggaacaggatgtcatcacctkttatragaaagcaggggacatcgcactcctgtatctccaagaratagaaagggtaatactttctaatattcaaaacagaagccctaagcctggccctgctccccacgatcaagaactaggwttttycctagaaacaggacttcagagagcccatgtcctctatttcaaaaatgggaacttgacaagaggagtcggaagatttagagagcttctcagagcagttgaaacaagaacaactcaaaacctgcgaatgacaatagccaggcagctggcagagatcttgttgcggggtatgtgtgarcagagctactggaaccctctggaggatccaccgtgccagtcacctctggacgatcctctccgcaaaggagcaaacacaaaaacctacactctcactcggagagcccgtgtctactcaggagagaacattttttgtcctcaagaaaatacggaagaagccctgttgttattgctgattagtgaatcaatggccaaccgggacgctgtgctgagcaggatacctgaacacaagagtgaccgcctcatcagtctgcagagtgcatctgtggtctatgacttactcaccattgctcttggaagaagaggccagtatgagatgctgtcagagtgcctagaaagagccatgaagtttgcctttgaggaattccacctgtggtaccagtttgctctgtccctgatggctgctggaaaatctgcccgtgccgtgaaggtgctgaaagagtgtatccgcctgaagccggacgatgccaccatccctctcctcgctgccaagytctgcatgggctccctgcactggttggaagaggctgaaaagtttgccaaaactgtcgttgatgtgggagagaaaacgtcagagttcaaggccaaaggctacttagctctggggctcacgtacagtctgsaggccactgacgcttctttgcgagggatgcaggaggtcctacagagaaaggcgcttcttgcatttcagagggcccacagcctgtcacccacagatcaccaagcagctttctacctggctctgcagcttgccatctccagacagatcccagaggctctggggtatgtccgccaagctcttcagcttcaaggtgacgatgccaactccctgcacctccttgccctcctgctgtcagcacagaagcattaccatgacgctctgaacatcatcgacatggccctgagtgaatacccagaaaatttcatactactgttttccaaagtgaagttgcagtcactctgccgaggcccggacgaggcactgctgacttgtaagcacatgctgcagatatggaaatcctgctacaacctcaccaaccccagtgattctggacgtgggagcagcctcttagatagaaccattgctgacagacgacagcttaatacaattactttgccagacttcagcgatcccgagacaggctccgtccatgccacatcggtagcagcctcaagagtggagcaggcactgtcggaagtggcttcgtctctgcagagcagtgcccctaagcagggcccgctgcacccctggatgacgctggcacagatctggctccatgcagctgaagtctatatcggcatcgggaagcctgcagaagccacagcctgtacccaagaagctgccaacctcttcccaatgtcccacaatgtcctctacatgcgcggccagattgctgagctccggggaagcatggacgaggcgcggcggtggtatgaagaggccttagccantcagccccacccacgtgaagagcatgcagcgacntggccctgatccttcaccagctaggccgytacagtytggcggagaagatcctccgggacgcggtgcaggtgaactcgacagcccacgaggtctggaacgggctgggcgaggtcctccaagctcagggcaacgatgcggcggctacggagtgcttcctgacagccttggagctggaggccagcagccccgccgtgcccttcaccatcatcccccgcgtgctctgagcaggcgcctgccagcctcacctgccgctcaggcctcagaggccctgccgggcaccagggcttgtgccatcgccccaaggggatgaatctgccgcactgaggccagggacgagtgttcagtgggccacagtgaaccaaccaaaccaaccccgaatcatcgctctcgccatgtgcgtttctcttgttttttttgccagcccaatggtagtttctgaacctattgacattgttcaaaatggatcatgtgccatattttgttagttgacatctgagttttcagtaaaatgattatggaattaatcagcaaatgtagaagaatatattcaaagttaaaattcagtggcagcacagattatttttatcagagctgtaaagaaaacaactgtccttttctccccaccacccctcctgccccactttggcccagaaaccaaatgtgaacttcctgtctcccacctcagcactagtccatgccaggacaccagctgacaatttcttggttttactgtcaataattgtaccatgtgatcaattactgtcctcacttagaacaaagcctgagtccgagaatatttatattttaccaatatatgcctgttacaagagaaggaaatatgagttatttaagtttaacttttttatgtgaattcagagtttatttatcgagggaaatatgtacaaagaagcttcaaatggaatatttaccgacattccttatacatgacagacacttggctacatgggaagatgatgttaataataaaatgatttttaaatggaaaaaaaaaaaaaaaaaaannaa

SEQ ID NO: 1913 - DNA, 1986 bp, Homo sapiens
  misc_feature (135)..(135): n equals a,t,g, or c
  misc_feature (139)..(139): n equals a,t,g, or c
  misc_feature (208)..(208): n equals a,t,g, or c
  misc_feature (219)..(219): n equals a,t,g, or c
  misc_feature (221)..(222): n equals a,t,g, or c
  misc_feature (234)..(234): n equals a,t,g, or c
  misc_feature (1119)..(1119): n equals a,t,g, or c
  misc_feature (1123)..(1123): n equals a,t,g, or c
  misc_feature (1170)..(1170): n equals a,t,g, or c
ttgcaccaggcactgctgcacaacaagatacgctcgccacagtccttctttgacaccacaccatcaggccgcatcctgaactgcttctccaaggacatctatgtcgccttgatgaggttctggcccctgtcaccntcancgccgctcaattacttcttcaacgccatctccactcttgtggtcatcatggccagcacgacggatcttnacttgtgggtnanntgcccctgggtngtgctcttacaccttagtgcagcgcttctatgcagccacatcacggcaactgaagcggctggaatcagtcagccgtcacctatctactcccacttttcggagacagtgactggtgccagtgtcatccgggcctacaaccgcagccgggattttgagatcatcagtgatactaaggtggatgccaaccagagaagctgctacccctacatcatctccaaccggtggctgagcatcggagtggagttcgtggggaactgcgtggtgctctttgctgcactatttgccgtcatcgggaggagcagcctgaacccggggctggtgggcctttctgtgtcctactccttgcaggtgacatttgctctgaactggatgatacgaatgatgtcagatttggaatctaacatcgtggctgtggagagggtcaaggagtactccaagacagagacagaggcgccctgggtggtggaaggcagccgccctcccgaaggttggcccccacgtggggaggtggagttccggaattattctgtgcgctaccggccgggcctagacctggtgctgagagacctgagtctgcatgtgcacggtggcgagaaggtggggatcgtgggccgcactggggctggcaagtcttccatgaccctttgcctgttccgcatcctggaggcggcaaagggtgaaatccgcattgatggcctcaatgtggcagacatcggcctccatgacctgcgctctcagctgaccatcatcccgcaggaccccatcctgttctcggggaccctgcgcatgaacctggaccccttcggcagctactcagaggaggacatttggtgggctttggagctgtcccacctgcacacgtttgtgagctcccagccggcagcntggnagcttccagtgctcagagggcggggagaatctcagcgtgggccagangsagctcgtgtgcctggcccgagccctgctccgcaagagccgcatcctggttttagacgaggccacagctgccatcgacctggagactgacaacctcatccaggctaccatccgcacccagtttgatacctgcactgtcctgaccatcgcacaccggcttaacactatcatggactacaccagggtcctggtcctggacaaaggagtagtagctgaatttgattctccagccaacctcattgcagctagaggcatcttctacgggatggccagagatgctggacttgcctaaaatatattcctgagatttcctcctggcctttcctggttttcatcaggaaggaaatgacaccaaatatgtccgcagaatggacttgatagcaaacactgggggcaccttaagattttgcacctgtaaagtgccttacagggtaactgtgctgaatgctttagatgaggaaatgatccccaagtggtgaatgacacgcctaaggtcacagctagtttgagccagttagactagtccccggtctcccgattcccaactgagtgttatttgcacactgcactgttttcaaataacgattttatgaaatgacctctgtcctccctctgatttttcatattttctaaagtttcgtttctgttttttaataaaaagctttttcctcctggaacagaagacagctgctgggtcaggccacccctaggaactcagtcctgtactctggggtgctgcctgaatccattaaaaatgggagtactgatgaaataaaactacatggtcaacagtaaaaaaaaaaaaaaaaaaaaaaa

SEQ ID NO: 1914 - DNA, 1387 bp, Homo sapiens
caaagtcctcagaggccagagagaggtgtaggaactgtgctagtgtaaggcagtgctgctacagtgggtccagatgaaatactgggaggtaggaagaaaatctggatttcatatcatccatttttaaatgaaaaattaagctttaatagtgttaaatgcgccacagagaacagtgtctatgtcactcttacaagagatgcacaaaaccaaggtgtacagccttcaagtgtgttctcaaaggagggtgcatgccttaaaaattgtggagaccactgctctgtcatctgtgattcccctgaaaacctctgggtacatgaagccctccccaaggggaatctggacacccagcacattctgcccacagggagatcttcagggctcgtgaattctgattccgcccagcagtcactctycagcccttcggtatccacgaagttggtggggtgctgaggtgatgcttcagactcagtgtggcccacatcgactttataacttaatatggcaaaatgatttgtacagtgatgtataagatgaagtgtggtcatgagacaagacccccagctcagagtcgagccaggcccaccaagaggccagctccacaccctgggtgatggccagaatggctgggagtcatgtgtctgtctgtggtcacaaaggcctgagccaaccctgtgtttgagaagttgagacctgtttgttcccaaacagmaacccctagacccgcattcccagtgcatatggacaggccataccacgsagaagccagcccttccctgaagcagcattcaacacacaggcctggccctcgtcctcccgactcccccttggtgccccagttgactgtgcacctttgagcagggccgccaggggtgaggctttgacccagacagaagggcctcggtgtcaggcattggaattgcgtgattgccttctctcggtctttattkcctattagaaaatatttccacgttttttcatggttgcgaagcagtgctccgctggttgtgcagcgatggagagacccaagccagaggagaagcggtttctcctggaagagcccatgcccttcttttacctcaagtgttgtaaaattcgctactgcaatttagaggggccacctatcaactcatcagtgttcaaagaatatgctgggagcatgggtgagagctgtggtgggctgtggctggccatcctcctgctgctggcctccattgcagccggcctcagcctgtcttgagccacgggactgccacagactgagccttccggagcatggactcgctccagaccgttgtcacctgttgcattaaacttgttttctgttraaaaaaaaaaaaaaaaaaaaaaaaaaaaaaaaaaaaaaaaaaaaaaaaaaaaaaaaactcga

SEQ ID NO: 1915 - DNA, 1410 bp, Homo sapiens
  misc_feature (11)..(11): n equals a,t,g, or c
  misc_feature (1409)..(1409): n equals a,t,g, or c
ttacaggcgtnacactgtcacccagccgaccctgtctctttaaaaaagagagcgagcgagtraccgtagaaattatgagaccggttaggaagcagttttagaagcccctgcctaaggtgagagactkaaggaaataaatgacagggagaatgcaggaaaggagggcagagaaaggacctgtggcctgcagggtggggaagagcagagggaaaggtggcctcaggtcggagaggctggaaatggactggcctgcctgagagtggtgggttcccgctgggaggcttttgagggggtagcagtcttggggccatcaggcagtggtcaggagacttccggagtgctgctctgcaagggaatgggttagatggcagattgcacagagctgtggtgaggacatggagcaagactagcggcttgttaaagaagttgaagaaacagtcatggaacggaggagggaagctggacagcagctagagggaaccggttcaatgcttttgtttttccctgaaaataaagacttacacagatttgaaggcagaactggggcttgggcacagaaagaatataaataaggcccccgaggagaaggccccttcctggcataggatagaagaataactttgtgtttggagacatggtgcaggaatggtggaggagctgctctattattagctctattaacttaaggtagaaaggtgtcatttatcagggttgggtggcggcagggccagagccagcagtggaggctcatgagcgtggagaagatgtggaaaggctgaggaatttctcagagggtgacggactgccagctgccctgaggttgctcttacttgttacagtggacaagctgctttgctagcgtgcagatggagaaggcgggcccgggaggcttggagtttggcccaggagctggcaggtgcccagcagcagtttcactgcccgcttcaggcgactctccactggcttcctgggagccttccgttaggagatgctctctcaagatccccgtcaccagggctttctggttggaatgaggcaaggacctgctttacacggtgcgccccattacccaacagcgtttcctgtccttgctggccacagccatcacagtggggctgtcatcagccactttaaacaggcaaaacgtatttacctgtcagggaaaataccaagatcacaaaggtggttttcccagggcaaggttcgtccattgcactccagatgtgctgacccctgcgatttcttcatatgtggggaactgcactcacactctccccagcaatacaaataaataagtaggctgggcacagtggcccatgcctgtaaagcactttgggaggccagggcagtaagatttgcttgaggccaggagttgaagaccagtgtgggcaacatagcaatacctcctnt

SEQ ID NO: 1916 - DNA, 183 bp, Homo sapiens
cgaagctcagcttaggctcttcttatccgatgtaacctgaaaattctcctgaactaaattttcctaaaacagaacttccatcacgtcccctggtgctcacagccccacagactactgctcaccactgcctgcaagatgaaggctgctattctcaggctggcagaggcaggccttcgttacggc

SEQ ID NO: 1917 - DNA, 2661 bp, Homo sapiens
  misc_feature (2648)..(2648): n equals a,t,g, or c
  misc_feature (2653)..(2653): n equals a,t,g, or c
ggcacgagggaggcttgaggtggaagtgggggtcgggcactctgacctggtcgaggaggggctagggtttgaaccggggacagagtctaggtgagctggggcttgggagctattagcgtagaggatccgggttcggttgctctggcgagggctccagcatcacaggcggcggctgcgggcgcagagcggagatgcagcggcttggggccaccctgctgtgcctgctgctggcggcggcggtccccacggcccccgcgcccgctccgacggcgacctcggctccagtcaagcccggcccggctctcagctacccgcaggaggaggccaccctcaatgagatgttccgcgaggttgaggaactgatggaggacacgcagcacaaattgcgcagcgcggtggaagagatggaggcagaagaagctgctgctaaagcatcatcagaagtgaacctggcaaacttacctcccagctatcacaatgagaccaacacagacacgaaggttggaaataataccatccatgtgcaccgagaaattcacaagataaccaacaaccagactggacaaatggtcttttcagagacagttatcacatctgtgggagacgaagaaggcagaaggagccacgagtgcatcatcgacgaggactgtgggcccagcatgtactgccagtttgccagcttccagtacacctgccagccatgccggggccagaggatgctctgcacccgggacagtgagtgctgtggagaccagctgtgtgtctggggtcactgcaccaaaatggccaccaggggcagcaatgggaccatctgtgacaaccagagggactgccagccggggctgtgctgtgccttccagagaggcctgctgttccctgtgtgcacacccctgcccgtggagggcgagctttgccatgaccccgccagccggcttctggacctcatcacctgggagctagagcctgatggagccttggaccgatgcccttgtgccagtggcctcctctgccagccccacagccacagcctggtgtatgtgtgcaagccgaccttcgtggggagccgtgaccaagatggggagatcctgctgcccagagaggtccccgatgagtatgaagttggcagcttcatggaggaggtgcgccaggagctggaggacctggagaggagcctgactgaagagatggcgctgggggagcctgcggctgccgccgctgcactgctgggaggggaagagatttagatctggaccaggctgtgggtagatgtgcaatagaaatagctaatttatttccccaggtgtgtgctttaggcgtgggctgaccaggcttcttcctacatcttcttcccagtaagtttcccctctggcttgacagcatgaggtgttgtgcatttgttcagctcccccaggctgttctccaggcttcacagtctggtgcttgggagagtcaggcagggttaaactgcaggagcagtttgccacccctgtccagattattggctgctttgcctctaccagttggcagacagccgtttgttctacatggctttgataattgtttgaggggaggagatggaaacaatgtggagtctccctctgattggttttggggaaatgtggagaagagtgccctgctttgcaaacatcaacctggcaaaaatgcaacaaatgaattttccacgcagttctttccatgggcataggtaagctgtgccttcagctgttgcagatgaaatgttctgttcaccctgcattacatgtgtttattcatccagcagtgttgctcagctcctacctctgtgccagggcagcattttcatatccaagatcaattccctctctcagcacagcctggggagggggtcattgttctcctcgtccatcagggatctcagaggctcagagactgcaagctgcttgcccaagtcacacagctagtgaagaccagagcagtttcatctggttgtgactctaagctcagtgctctctccactaccccacaccagccttggtgccaccaaaagtgctccccaaaaggaaggagaatgggatttttcttttgaggcatgcacatctggaattaaggtcaaactaattctcacatccctctaaaagtaaactactgttaggaacagcagtgttctcacagtgtggggcagccgtccttctaatgaagacaatgatattgacactgtccctctttggcagttgcattagtaactttgaaaggtatatgactgagcgtagcatacaggttaacctgcagaaacagtacttaggtaattgtagggcgaggattataaatgaaatttgcaaaatcacttagcagcaactgaagacaattatcaaccacgtggagaaaatcaaaccgagcagggctgtgtgaaacatggttgtaatatgcgactgcgaacactgaactctacgccactccacaaatgatgttttcaggtgtcatggactgttgccaccatgtattcatccagagttcttaaagtttaaagttgcacatgattgtataagcatgctttctttgagttttaaattatgtataaacataagttgcatttagaaatcaagcataaatcacttcaactgctaaaaaaaaaaaaaaaaaaaactcgagggggggtcccgtacccaatngcctnacatgcat

SEQ ID NO: 1918 - DNA, 381 bp, Homo sapiens
gcggacgcgtggggctagggtttgaaccggggacagagtctaggcggyggctgcgggcgcagagcggagatgcagcggcttggggccaccctgctgtgcctgctgctggcggcggcggtccccacggcccccgcgcccgctccgacggcgacctcggctccagtcaagcccggyccggctctcagctacccgcaggaggaggccaccctcaatgagatgttccgcgaggttgaggaactgatggaggacacgcagcacaaattgcgcagcgcggtggaagagatggaggcagaagaagctgctgctaaagcatcatcagaagtgaacctggcaaacttacctcccacttttacaatggaaaccaccccgaacccaagggtg

SEQ ID NO: 1919 - DNA, 1711 bp, Homo sapiens
ctagttctagatcgcgagcggccgctcgcgatctaggcagcgcccagcaacaagacagagctggcctggagtccgcggctggccgcgtgagtaggtgattgtctgacaagcagaggcatgagctgggtccaggccaccctactggcccgaggcctctgtagggcctggggaggcacctgcggggccgccctcacaggaacctccatctctcaggtccctcgccggctccctcggggcctccactgcagcgcagctgcccatagctctgaacagtccctggttcccagcccaccggaaccccggcagaggcccaccaaggctctggtgccctttgaggacctgtttgggcaggcgcctggtggggaacgggacaaggcgagcttcctgcagacggtgcagaaatttgcggagcacagcgtgcgtaagcggggccacattgacttcatctacctggccctgcgcaagatgcgggagtatggtgtcgagcgggacctggctgtgtacaaccagctgctcaacatcttccccaaggaggtcttccggcctcgcaacatcatccagcgcatcttcgtccactaccctcggcagcaggagtgtgggattgctgtcctggagcagatggagaaccacggtgtgatgcccaacaaggagacggagttcctgctgattcagatctttggacgcaaaagctaccccatgctcaagttggtgcgcctgaagctgtggttccctcgattcatgaacgtcaaccccttcccagtgccccgggacctgccccaggaccctgtggagctggccatgtttggcctgcggcacatggagcctgaccttagtgccagggtcaccatctaccaggttcctttgcccaaagactcaacaggtgcagcagatcccccccagccccacatcgtaggaatccagagtcccgatcagcaggccgccctggcccgccacaatccagcccggcctgtctttgttgagggccccttctccctgtggctccgcaacaagtgtgtgtattaccacatcctcagagctgacttgctgcccccggaggagagggaagtggaagagacgccggaggagtggaacctctactacccgatgcagctggacctggagtatgtgaggagtggctgggacaactacgagtttgacatcaatgaagtggaggaaggccctgtcttcgccatgtgcatggcgggtgctcatgaccaggcgacgatggctaagtggatccagggcctgcaggagaccaacccaaccctggcccagatccccgtggtcttccgcctcgccgggtccacccgggagctccagacatcctctgcagggctggaggagccgcccctgcccgaggaccaccaggaagaagacgacaacctgcagcgacagcagcagggccagagctagtctgagccggcgcgagggcacgggctgtggcccgaggaggcggtggactgaaggcatgagatgccctttgagtgtacagcaaatcaatgttttcctgcttggggctctcttccctcatctctagcagtatggcatcccctccccaggatctcgggctgccagcgatgggcaggcgagacccctccagaatctgcaggcgcctctggttctccgaattcaaataaaaaggggcgggagcgctgttggttgtgcgcaaaaaaaaaaaaaaaaaaaaaaaaaaaaaaaaaagggcggccgc

SEQ ID NO: 1920 - DNA, 1679 bp, Homo sapiens
ggcacgagcagcgcccagcaacaagacagagctggcctggagtccgcggctggccgcgtgagtaggtgattgtctgacaagcagaggcatgagctgggtccaggccaccctactggcccgaggcctctgtagggcctggggaggcacctgcggggccgccctcacaggaacctccatctctcaggtccctcgccggctccctcggggcctccactgcagcgcagctgcccatagctctgaacagtccctggttcccagcccaccggaaccccggcagaggcccaccaaggctctggtgccctttgaggacctgtttgggcaggcgcctggtggggaacgggacaaggcgagcttcctgcagacggtgcagaaatttgcggagcacagcgtgcgtaagcggggccacattgacttcatctacctggccctgcgcaagatgcgggagtatggtgtcgagcgggacctggctgtgtacaaccagctgctcaacatcttccccaaggaggtcttccggcctcgcaacatcatccagcgcatcttcgtccactaccctcggcagcaggagtgtgggattgctgtcctggagcagatggagaaccacggtgtgatgcccaacaaggagacggagttcctgctgattcagatctttggacgcaaaagctaccccatgctcaagttggtgcgcctgaagctgtggttccctcgattcatgaacgtcaaccccttcccagtgccccgggacctgccccaggaccctgtggagctggccatgtttggcctgcggcacatggagcctgaccttagtgccagggtcaccatctaccaggttcctttgcccaaagactcaacaggtgcagcagatcccccccagccccacatcgtaggaatccagagtcccgatcagcaggccgccctggcccgccacaatccagcccggcctgtctttgttgagggccccttctccctgtggctccgcaacaagtgtgtgtattaccacatcctcagagctgacttgctgcccccggaggagagggaagtggaagagacgccggaggagtggaacctctactacccgatgcagctggacctggagtatgtgaggagtggctgggacaactacgagtttgacatcaatgaagtggaggaaggccctgtcttcgccatgtgcatggcgggtgctcatgaccaggcgacgatggctaagtggatccagggcctgcaggagaccaacccaaccctggcccagatccccgtggtcttccgcctcgccgggtccacccgggagctccagacatcctctgcagggctggaggagccgcccctgcccgaggaccaccaggaagaagacgacaacctgcagcgacagcagcagggccagagctagtctgagccggcgcgagggcacgggctgtggcccgaggaggcggtggactgaaggcatgagatgccctttgagtgtacagcaaatcaatgttttcctgcttggggctctcttccctcatctctagcagtatggcatcccctccccaggatctcgggctgccagcgatgggcaggcgagacccctccagaatctgcaggcgcctctggttctccgaattcaaataaaaaggggcgggagcgctgttggttgtgcgcaaaaaaaaaaaaaaaaaaaaaaaaaaaaaaaaaaaaaaaaa

SEQ ID NO: 1921 - DNA, 712 bp, Homo sapiens
ttttttttttttttttttgagacagagtctccctctgttacccagggtggagtgcagtggggcaatctcggttcactgcaaccaccacctcctgggttcaagcgattatccttgccttagcctcctgagtagttgggatcacaggtgagcgccaccacacccagctgatttttgtatttttagtgaaaatggggtttcagcatgttggccaggctggtctccaactcctgacctcaagtgatctgcccatcttggcctcccaaagtgctgggattacaggtgtgaactaccgcatccggcctctttctatttttgtctggtgcttttgatctaatttgttttgaaattccgtaaaaagtaatcatcattacttagtaaacagaatccccaacatatttaccaattttccttgctcatcatttaaaattttatctcattctgtctttctgggtttttctttttgctgattcacatcctttagaaattcttccagtgagtctatgaaaaaaaccttatctttgtctgaaaatgtctttattttgccccactcttaattgctacttttcctctatcagtttggaggtattattctcctgtcttctgacatcttgtgcccaatcatctttccttttaggtagcatgtcttttctgtttttcttttctttccttccctcccttccttcttttcaagatttctgttttgcctcgtgcc

SEQ ID NO: 1922 - DNA, 344 bp, Homo sapiens
  misc_feature (268)..(268): n equals a,t,g, or c
  misc_feature (317)..(317): n equals a,t,g, or c
  misc_feature (334)..(334): n equals a,t,g, or c
cccccccccggaattcccgggtcgacccacgcgtccgcttaagcaataaaagtttactggttgtcctatttgccatattattgaaacttggaaaggataatttgaaacaaggtttgaagttaactgaaatatggagattgaatttatactcaattcttgtgaaaagtcttgcttaataagtatgattaaactttgcttcttaaaaaaaaaaaaaaaaaaaaaaaaaaaaaaaaaaaaataaaaaaaaaaaagggcggccgctctagangatccaagcttacgtacgcgtgcatgcgacgtcatagctcttctatagngtcacctaaattcaatncactggccgt

SEQ ID NO: 1923 - DNA, 790 bp, Homo sapiens
  misc_feature (17)..(17): n equals a,t,g, or c
  misc_feature (783)..(784): n equals a,t,g, or c
cctcacatactcaccangcagcctgcagaggatacagctttccatgtggctcagggaacagttgatatcaacagtctctcaatttctttattattattatactttaagtyctgggatacatgtgcagaacgtgcagcgttgttacataggtatatakgtgccatggtggtttgctgcacccatcaacctgtcatctacattgggtatttctcctaatgctatccctccccttgcccccaacctcccaacaggcaccggtgtgtgatgttcccctccctgtgtccatatgttctcattgttcaacttccacttatgagtgagaacatgcagtgtttggttttctgttcctgtgttagtttgctgagaatgatggtttccagtgtcatccatgatcctgcaaaggacatgaactcatccttttttatggctgcatagtattccatggtgtctatgtgccacattttctttaaccagtctgtcattgatgggcatttgggttggttccaagtctttgctattgtgaatagtgccgcaataaacatacatgtgcccggcctagattgatattcttaagcaataaaagtttactggttgtcctatttgccatattattgaaacttggaaaggataatttgaaacaaggtttgaagttaactgaaatatggagattgaatttatactcaattcttgtgaaaagtcttgcttaataagtatgattaaactttgcttcttaaaaaaaaaaaaaaaaaaaaaaaaaaaaaaaaaaaaaaaaaaaaaaaaaanngggggg

SEQ ID NO: 1924 - DNA, 726 bp, Homo sapiens
ggcacgagctttttggtatgctggtggatttgatttgcctgtattttgttgaggacttttgcattgatgttcataaaggatattggccttaaatttttcattttgtctctgccaagtttttgtatcaggatgatgctggcctcatagaatgagttggggatgttagctagttattatgcagacttgtttctgtagttgctttatggtgtcactggtctgtgtacttcagtgtgtttctgtagtggctggtaacattgtttcctttccatatttagtgcttctttcaggagctcttccaaggcaggtcgtgtggtaatcaatttcctcagcatttgcttgtctgaaaagaatcttcttaggctgggtgccatggctcatgcctgtaatcccagcactttgggaggctgaggtgggaggatcacttgaggtctggcgttcaagatcaggctggccaacatgatgaaacccccgtccctactgaaaataaaaaaaattagctgggcatggtggtgggtgcctgtaatcccgagtagctaggactacagacccacgccaccacacccagctaatttttgtatttttagtcgagacagggtttcaccatgttggccaggatggtctcgatctcttgacctcaagtgatgtaggaagatctaccaggcaaatggaaagcaaaaaaaaaaaaaaaaaactcgagggggggcccggtacccaatcgcacctgat

SEQ ID NO: 1925 - DNA, 762 bp, Homo sapiens
  misc_feature (4)..(15): n equals a,t,g, or c
  misc_feature (17)..(17): n equals a,t,g, or c
gggnnnnnnnnnnnnancgtttgtaatacgtractcactbatagggcgarattgggttaccgggcccccccctcgagttttttttttttttttttttgctttccatttgcctggtagatcttcctacatcacttgaggtcaagagatcgagaccatcctggccaacatggtgaaaccctgtctcgactaaaaatacaaaaattagctgggtgtggtggcgtgggtctgtagtcctagctactcgggattacaggcacccaccaccatgcccagctaattttttttattttcagtagggacgggggtttcatcatgttggccagcctgatcttgaacgccagacctcaagtgatcctcccacctcagcctcccaaagtgctgggattacaggcatgagccatggcacccagcctaagaagattcttttcagacaagcaaatgctgaggaaattgattaccacacgacctgccttggaagagctcctgaaagaagcactaaatatggaaaggaaacaatgttaccagccactacagaaacacactgaagtacacagaccagtgacaccataaagcaactacagaaacaagtctgcataataactagctaacatccccaactcattctatgaggccagcatcatcctgatacaaaaacttggcagagacaaaatgaaaaatttaaggccaatatcctttatgaacatcaatgcaaaagtcctcaacaaaatacaggcaaatcaaatccaccagcataccaaaaag

SEQ ID NO: 1926 - DNA, 692 bp, Homo sapiens
ggcacgagctttttggtatgctggtggatttgatttgcctgtattttgttgaggacttttgcattgatgttcataaaggatattggccttaaatttttcattttgtctctgccaagtttttgtatcaggatgatgctggcctcatagaatgagttggggatgttagctagttattatgcagacttgtttctgtagttgctttatggtgtcactggtctgtgtacttcagtgtgtttctgtagtggctggtaacattgtttcctttccatatttagtgcttctttcaggagctcttccaaggcaggtcgtgtggtaatcaatttcctcagcatttgcttgtctgaaaagaatcttcttaggctgggtgccatggctcatgcctgtaatcccagcactttgggaggctgaggtgggaggatcacttgaggtctggcgttcaagatcaggctggccaacatgatgaaacccccgtccctactgaaaataaaaaaaattagctgggcatggtggtgggtgcctgtaatcccgagtagctaggactacagacccacgccaccacacccagctaatttttgtatttttagtcgagacagggtttcaccatgttggccaggatggtctcgatctcttgacctcaagtgatgtaggaagatctaccaggcaaatggaaagcaaaaaaaaaaaaaaaaaaa

SEQ ID NO: 1927 - DNA, 585 bp, Homo sapiens
  misc_feature (4)..(4): n equals a,t,g, or c
  misc_feature (30)..(30): n equals a,t,g, or c
  misc_feature (560)..(560): n equals a,t,g, or c
gctnttagaaactagtgggatccccccggnctgccaggaatttcggcacaggagaacctcatattccttagtcatctgatataactgcagggagggagtagatattggaaagccattagtcctatttattacatgaggaaaatgaaggtcaaagaagtgaaaagggattgtggggatattcgctcatgagaagcactgggctcttcttaggacaaggttagcctcacgtgtactcagctgcccgtttcaggtttttttttttgtttgtttgtttgttttttttttgacggagtttcactctttggcccaggctagagtgcaatggtgtgatctcagcccactgcaacctccgccccctgggttcaagtgattcctgcctcagcctcccagctactcgggaggctgaggcaggagaattgcttgaacccaggaggcggaggttgcaacactgcactccagcctgagtgacaagattgagactcggtctcaaaaaaaaaaaaaagaaaaaaaaaaaaaaaaaactcgagggggggccggtaccaattcgcctatagtgagtngtattacaattcactggccgtcgtt

SEQ ID NO: 1928 - DNA, 1242 bp, Homo sapiens
ctccatctcaaaaaaaaaaaaaaaaaaaatttagaatgtgttagagaaatttaacaagtagaacaggtgatttctggttgatagactctatcttgcagtatatttatttcatgtatcagaccccaaagttgttgccttgttatttttttaatttctcacatttttgaaaaatagatgctatcctctatagtaaaatattgaatcactttatagtagacaatacatatgacatttaacaaatacttggtttgaaaaagtttggctttattcaacaattttagtttgcccactgattttcaaatgtctgtgggattgcttataactaagtagaaagtgaagattgatttttacttaagaatgggatagagatgagttttatggtttttaaaagtattttcagttcattatttaaatgttgggttgttgatatggtcttgtttctgataaggaaataggagcaacttgttttaaaataactacactaaaagactttcttcatctccgtatagagaaatccagatttcaattaattcatttattgggtgctaacaaaattcagggttagagtaaatttaggtctgttggtccatgtggcctggtttcctagcacccattaaacataatgctatcttttaagcctgaacatgtgggttttttaaatcaaattggaaaaaaattagacaactgatgtcatgctgtcttggtatccatactaaaaaagtatcaggaaaatagattatttttgtgctgtgaaacactattcagtggaaagtttagtggcaacttttccatatcattcatgacttaatacctgaaatgcacttttaaatgtttgccttatatccaagtgtttacttgtatccatgacctaaccgtctattgaaaagaatgtttgcagatgcagattgcaatgttgtttgtattcataggcaaaagtcctcttctctagtataattttttaaatctgagagaattgaaggtacagaaaaaaattctggagtgcctgaaccacagtttgagagcacaaaggtcacattctttcagtaaatttgggggaaataaatttcagctacctggttagcttcagtgactacttacacacagggctttggttccattacttgtttccaccacagccacatcctaaatacttggaatatccgaaaacaacttctaaaatcactcaataaaagtattcacttctaaaaaaaaaaaaaaaaaaaaaaaaaaaaaaaaaaaaaa

SEQ ID NO: 1929 - DNA, 2105 bp, Homo sapiens
ctgcttctcggctccgttgctcccgcggcgcgaggcgctctcgctctcctcctcctccgccgtcgcccctccccccgcgcagcccccgccgccaccgccgcgagacccccgcacgccgctctccccccaccctctcctgccccgcgcgccctccggcccctgcggcccccgaagagaacgagagggcgagcgagcgcggmgttcccgggccggsccggcccsctcccttcaccatcgccggccctmcgccgccttcctccgcttccacctcctctccccccccccaagttgaggccccctccgggggggggaggcccgggaccgggacccgtagcgaattctcctaactccctcgacctctcctctcgcccggcccgagtgtgaggagaagggcccggcccggcctgcgtcgtgtgtgaggaggaccccgggcgggcccacgggccgtgtggggcctggtccggcccgccgggtgtgtgaagaccggggcccggtgctgcccggccggagggcgagcggaggggaggggcctggtccggcccggccggtgcgtgaggactggggcccgggcccggcgccgccgccgccgccgccgccgcgatggcccagcagcagatgaccagctcgcagaaggccctgatgctcgagctgaaatccctgcaggaggaaccggtggagggcttccggatcaccctggtggacgagtccgacctctacaactgggaggtggccatcttcggaccccccaacaccctctacgaaggcggctacttcaaggcgcatattaaatttcctattgactacccctattcaccacctaccttcagattcttgaccaaaatgtggcaccccaacatttatgagaatggagatgtatgcatttcgattcttcatccgcctgtagatgacccacagagtggagaactgccttctgaaaggtggaatcctactcagaatgtgaggactatcctattaagtgtaatctcactgcttaatgagcccaacaccttctccccagccaatgtcgatgcttcagttatgttcaggaaatggagagacagtaaaggaaaagacaaagaatatgctgaaattattaggaaacaagtttcagccactaaggccgaagcagaaaaggatggagtgaaggtccccacaaccctggcggaatactgcatcaaaactaaagtgccttccaatgacaacagctcagatttgctttacgacgacttgtatgatgacgacattgatgatgaagatgaggaggaggaagatgccgactgttatgatgatgatgattctgggaatgaggagtcgtgacgtgctccttcagtgcccctgtactgccctgccatctcaggccaaagggaggggagcaagtggggacctggccatggcccctcagcaaaaacctattcacagcgggtggggaaacacacacagctcctgctgactccccttatggatctcagtttgctcctttttatggacctttaatggagagagagtaaccctccacagaatgtctgaattcttgcattctttacccttccatcactatattgattctttttttaaaaaacatgaacccaaactcccgcctcacttcgtctctacagaatgttcacagcaaaacacgtttggtctgtttttagattcttgaagaattcaatagtctttcaagatgtttaatgtgtttaaagctgggaacctgttgggagttcacaagtgctgcatatactgggtagcaaaagaaaatggaaaaaaacccacaaaacaaactttaaaaaaaaaaaaaaacaaatttgccaaggtttagctgctcatttacattagtgtgtgtgcattcgttcagccccatggtggtgaattctgtttctttcctttcctaaggctgggacatggtgggcatcagggactttgtgctaagcctgatgaaatgtgctccttcaatctccatgaaaccatcgtaacatggaggcctcagctgctctgaggagagaaatcagactttgttttttgaaatcgattgggatcgaaagcctgaaataaatattcatactttccatagaaaaaaaaaaaaaaaaaaaaaaaaaaaaaaaaaaaaa

SEQ ID NO: 1930 - DNA, 1439 bp, Homo sapiens
  misc_feature (1425)..(1425): n equals a,t,g, or c
  misc_feature (1439)..(1439): n equals a,t,g, or c
ggcacgagcggcacgagcggcacgagtctgagggacttcgacaccaggatgactttgaygtgtctctgcttgtctgtcactgtgctgcaccctttgaggagcaaggagaggctgagcggcacgttctgcggctacagttcttcgtggtgctcaccagccagcgagagctcttccccaggctcactgctgacatgcgccgcttccggaagccacccagactgccccctgagccagaggctcctgggagttcagctggcagccctggggaggcctcagggcttattctagcgcctggaccggctcctctgttcccaccactggctgcagaggtgggcatggcacgagcacggctggctcagctggtgcggctggctggagggcactgccgtcgggacaccctttggaagcgcctcttcttgctggagccaccggggcctgatcgactgcggctaggggggcgcctggccctggcagagctggaggaactcctagaagcagtccatgccaaatccattggggacatcgacccccagctggactgcttcctatccatgacggtctcctggtaccagagcctgatcaaagttctcctaagccgcttcccccagagctgtcgccatttccaaagcccagacttgggaactcagtacctggttgtgctgaatcagaagttcactgactgctttgtgctagtgtttctggactcccacttaggaaagacgtctctgacagtggttttccgagagcccttcccagtacagccccaggacagcgagagcccccctgcccaactggtctccacctaccaccacctggagtctgtcatcaacacagcctgtttcaccctctggacccgcctcctctgagggagtggactggaccactgaatgtcactgttccttgaatcatgggcctaccagattgcctgccagaggcaggactgaccagcccttctgggccccagggcaagccagacactgagtgacaccaaaggctttgtaactatgtcttgagggtctgctgccccagcctggcagcaggaaccgccctccccaaacacccacagccactgacccatccaggactccagagagtcaggtcaaccccgaggaccccttgggcccttctggggtactcctttcggcccccctggtagagtctcgggagttcacacagggtggcaaacaccccctagagctcctctgcctgaatcctgccccctagcctttgaccactgtcagccacctgtgtcccttgagccttcgggtcttcacttcccacttggacatcactgctggacattcccatcgagatgacacctgggttccaatcccagctctgcctttgaagcacttrcggccaccgtcaagtccctttgctctcggaccctgggtttctsatcstttaatgaaatraattcagggnggtttccagacctn

SEQ ID NO: 1931 - DNA, 1226 bp, Homo sapiens
  misc_feature (15)..(15): n equals a,t,g, or c
  misc_feature (29)..(29): n equals a,t,g, or c
  misc_feature (1106)..(1106): n equals a,t,g, or c
ctccggaagaatggntctgcaccgcggcngcggacgctctagaactagtggatcccccgggctgcaggatttcggcacgagctgctgaggcgtgagaatggcgtcccgcggccggcgtccggagcatggcggacccccagagctgttttatgacgagacagaagcccggaaatacgttcgcaactcacggatgattgatatccagaccaggatggctgggcgagcattggagcttctttatctgccagagaataagccctgttacctgctggatattggctgtggcactgggctgagtggaagttatctgtcagatgaagggcactattgggtgggcctggatatcagccctgccatgctggatgaggctgtggaccgagagatagagggagacctgctgctgggggatatgggccagggcatcccattcaagccaggcacatttgatggttgcatcagcatttctgctgtgcagtggctctgtaatgctaacaagaagtctgaaaaccctgccaagcgcctgtactgcttttttgcttctcttttttctgttctcgtccggggatcccgagctgtcctgcagctgtaccctgagaactcagagcagttggagctgatcacaacccaggccacaaaggcaggcttctccggtggcatggtggtagactaccctaacagtgccaaagcaaagaaattctacctctgcttgttttctgggccttcgacctttataccagaggggctgagtgaaaatcaggatgaagttgaacccagggagtctgtgttcaccaatgagaggttcccattaaggatgtcgaggcggggaatggtgaggaagagtcgggcatgggtgctggagaagaaggagcggcacaggcgccagggcagggaagtcagacctgacacccagtacaccggccgcaagcgcaagccccgcttctaagtcaccacgcggttctggaaaggcacttgcctctgcacttttctatattgttcagctgacaaagtagtattttagaaaagttctaaagttataaaaatgttttctgcagtaaaaaaaaagttctctgggccgggcgtggtggstcacacctggtaatcccagnaccttgggaggctgaggtgggaggatcatttgaggccaggagkttgagacctgcctgggsaacatwatgraacttcctttccagggagaaaaaaaaaaaagctgggccttttgggggaca

SEQ ID NO: 1932 - DNA, 2413 bp, Homo sapiens
  misc_feature (1)..(1): n equals a,t,g, or c
  misc_feature (3)..(6): n equals a,t,g, or c
  misc_feature (8)..(9): n equals a,t,g, or c
  misc_feature (12)..(12): n equals a,t,g, or c
  misc_feature (399)..(399): n equals a,t,g, or c
ncnnnnanntancgtttagtgtagtgttcaaccgcatagcgctccagggtggatgatatccttccgtcccgtgctcctattcctatcccgacaatttccaagttcaccttgggacggtaaacttctcgtggcaactcctttccaaaattaagggacgaccagctactcacctacatgaaccttcttagggggtttaaaaagagatggatagtggcgctgtcagaaactggggctctgctcacaagaaatggccagtcgccatctgtgtacacacccccatcccattattaaccgcctgtccatcaactggaattgtatcttaatgtaaacccaactagcatgcagcattgtaatcttacmactgatcacgtggacagtgaacarcggtcaactttgtcnttaaaaaaaaaaaaacaaaaaaccccaaaagaccacacaatcctgaaaatttcccagcagcactctcagtcatcagtatctcaggaactgaacttttgagcaaaatagagattcaaaatccactttcctactcctctgaggacaatgtttcagggtaaactggtggtatttcccagtggcatgcccacttgacaacatgcccgttcgatcatttcctttccttctccaccacttggcctccggcctgagaaaggggccagcaataaggaatgacagacagtaaggcaatcttacaatgtcagaaaatgtatttggctttttttttctttttaaaataagtgcatacaaatacagctagaagcatttctgatttgccaagtgctctaaaaaagcagcgcaagtcacagcctacatagaacggtaactgtcaccaggataataaagcacaaagatatgctaataacgttaacaaaagaaaaaaatgtctttataagtacataccttttgtcgtcaaaaaaaatatagaaacacaatgtattcaaaaaaaatcaaaattatacagccatgtttatgaagtctacatttcccttgtcttggatatatatatatatggagatatatatacaattcaagcagttttaattaagggtaatcattgggtttttctgaaaccggaaaagtcacgagtctctctcttttttcactttcacatctccagcaaggatggttgcaatttccccttgcataaaggcccaggggacattggagcccacaagagggcatttttccccactgggacaatagacctctccactagctccctgctgtttgatgctttgtctggagcaagggaagcagaacttgtgcgaagggacggacgggcactgcacaaaatgggtgtcctccagccgctcgtggcagagggtgcagcacagcggggcactggttgccagagaggagtccgggaggctggcagggtgcactggctccagtcctcctgtgttgcctgctccctggccccccacctctctggggcccagccttctttggttcatagaggacggagagggcggactgttgctattcctcctggtagtggagtgaacctggttggcatcttttgaggcatgactgccccctgcattgtctgctactaagatcagggctgccatgggggactggccattctgggccgcttcaggcggtgtggtccggttggaatgaggtgaggcagtgggtggtggcggagacacaaaagaggatgtaggagtcatggggatcttgagcccctctgtggatgtggacagccacggctgggcctctccgttgatcttagggggcccgacttcaccttctggttctggagagggcttccttttccttgctgttcttgcaactgcagtcagggccggctccttcttaaacttgctctcgaagggccccgagtggccgtgctggtgcagcgccagcagcgtgtcgcgcacggtcttgggcctgttgacccagtcctgctctccagacccgcggctcttgcccgcaccttccgcgctcagctcggcggccccggcmgcggtggacaggctgtcggccgggccccggtgcgcaggcggcggcggttgtttctccttggctgccgcctcacgctgctcgtgctccacggcagcgctgctcgacacggatgccggccgcttgtgggcgcccagatcggtgggctgcgcggagcccaggctggcggccgcggttccggacaccgcggctaaggaggcggcagcgcggccgccgaggccgagcgcggtgggcagcggcgtggccgagccgttcatgagcggcaccagggtgggcggcaccgcgtggccgcgccgcgggttcgggctctggcgattcagctcgggcggctcctctctcgtgccgaattcctgcagcccgggggatccactagttctagagcggccgccaccgcggtggagctccagcttttgttccctttagtgagggttaatttcgagctggcgta

SEQ ID NO: 1933 - DNA, 1340 bp, Homo sapiens
  misc_feature (604)..(604): n equals a,t,g, or c
gagccgcccgagctgaatcgccagagcccgaacccgcggcgcggccacgcggtgccgcccaccctggtgccgctcatgaacggctcggccacgccgctgcccaccgcgctcggcctcggcggccgcgctgccgcctccttagccgcgktgtccggaaccgcggccgccagcctgggctccgcgcagcccaccgatctgggcgcccacaagcggccggcatccgtgtcgagcagcgctgccgtggagcacgagcagcgtgaggcggcagcaaggagaaacaaccgccgccgcctgckyaccggggcccggccgacagcctgtccaccgckgccggggccgccragctgagcgcggaaggtgcgggcaagagccgcgggtmtggagagcaggactgggtcaacaggcccaagaccgtgcgsgacacgctgctggcgctgcaccagcacggccactcggggcccttcgagagcaagtttaagaaggagccggccctgactgcaggcaggttgttgggtttcgaggccaacggggccaacgggtctaaagcaggtaggggcggctgtgaagtgagggggtctaggggagaaaaggggacggagagcanaggaagggtggttctttggattcaccattttaccccagcccagaaacaacaaacaccccacttcctgatctgcctgaggggaaccagtgcttggtggcaacgtgttcatgtsctgaagcagcataacaaagaatgagtcagactgggctgatacgctctgaacacggggttttcctttcccagcacattcttggatgggagcatgagggcaccagtcacctttwaacctattgggggacattagcagtcacatgttgagtgcaaacgaggtacttttgtgcatgtktacaaacaggcagttacaagcgtgtcattttcagtggctccattttaaatcagtctgctgcctcagaatcccgtacgcctgaaggttttaagttgcatgtgcacctgaaactcgtatatgagtattttctgtctgtgcttttagagaggaggaattctgtaacgacttttgtttcgggttaggaagagaatgatctctttcagtgcaccgccacttatgttacctttttccttttatttctttgtgtttccagttgcaagaacagcaaggaaaaggaagccctctccagaaccagaaggtgaagtcgggccccctaagatcaacggagaggcccagccgtggctgtccacatccacagaggggctcaagatccccatgactcctacatmctcttttgtgtctccgccaccacccactgcctcacctcattccaaccggaccacaccgcct

SEQ ID NO: 1934 - DNA, 1475 bp, Homo sapiens
  misc_feature (9)..(9): n equals a,t,g, or c
  misc_feature (13)..(13): n equals a,t,g, or c
  misc_feature (26)..(26): n equals a,t,g, or c
  misc_feature (31)..(31): n equals a,t,g, or c
cgggttaancccncgaagaaagtttnccttnttaccaaagcgtcccacagtacccgggctttggcctcaaggccttcgagtcccgacgtcctccccagagcacaaacctactacaggttaggccggagccgccacagcccagggtctctgccacctggcccgccccctccgaggcgccggagagcgattcccaaggggcctgccggagcgtggcgtcacaggagcgtcgcgtcacgtgaggctgccatccaatcgcggcgcgcgctctgccctgcgggcagcgggtgccaggcacggtgtcagcaggcaacatggccgagaggccggggcctccgggcggcgccgtgtccgcgaccgcgtaccctgacacccccgcggaattccctccgcacctccaggcgggtgcgatgcggcgccgcttttggggcgtattcaactgtctgtgcgccggcgcgttcggggccctggccgccgcctccgccaagctggccttcggcagcgaggtggtaagagacgtcggggactgaggcctcttcccttaccagggacctaaaaccttttctccggttgggctagttcgctctcggggaagaactacacctcctacatccaccctctacctctcattttaagtccyttgtgcctgagcatttctctccacgtgactcttaaggtgagcatgggtttatgcgtcttaggcattattgtgatggcgagcaccaattctctgatgtggaccttctttagccggggcctcagtttctccatgtcttcagccattgcatctgtcacagtgactttttcaaatatcctcagctcggccttcctgggctatgtgctgtatggagagtgccaggaggtcttgtggtggggaggagtgttccttattctctgcggactcaccctaatccacaggaagctcccacccacctggaagccccttccacacaagcagcagtagcaccacttggctagacggaccagctggaaagatcatgatggtggcccagccttgggatgtcatgtgggactgtgtcctagggcgatccagttgtgcagccttctgaccatcagccaagggaagcaggcctctgatggagcaggctctggctctgtaaggagaggtgcagctgcagcagtgttctaccggaagtgttttgatcatctgtacagtgctttggattcttcctcccaggcctaccccagtgagccttcgcagatgctggagatcctggggttggtctgctttgtgtatggtacttgaaaccacgctgtaattattgtcctgttgccaaacaaaagccagtcatgtaactctagaagcagtgactggtggggctttctgacagttccatgctgatgtatcaggccatctgtgtcatgcttatgtattatggcaagaagaggaaaactggattaataaatacgttttttgtaagttaaaaaaaaaaaaaaaaaaaaaaaaaaaaaaaaaa

SEQ ID NO: 1935 - DNA, 2555 bp, Homo sapiens
  misc_feature (673)..(673): n equals a,t,g, or c
tgcggagagggaccacctatgtggagcaggtccaggakgagctgggggagctgggcgaggcgtcccaggtggagacagtgtcagaggagaacaagagtctgatgtggaccctgctgaagcagctacggccaggcatggacctgtcccgcgtggtgctacccacgttcgtactggagccgcgctccttcctgaacaagctytccgactactactaccacgcagacctgctctccagggctgcggtggaggaggatgcctacagccgcatgaagctggtgctgcggtggtacctgtctggcttctacaagaagcccaagggaatcaagaagccgtacaaccccatcctgggggagaccttgcgctgctgctggttccacccgcagactgacagccgcacattctacatagcagagcagtgtcccaccacccgcccgtgtctgccttccacgtcagcaaccggaaggacggcttctgcatcagtggcagcatcacagccaagtccaggttttatgggaactcgctgtcggcgctgctggacggcaaagccacgckcaccttcctgaaccgagccgaggattacacccttaccatgcccyacgcccactgcaaaggaatcctgtatggcacgatgaccctggagctgggtgggaaggtcaccatcgagtgtgcgaanaacaacttccaggcccagctggaattcaaactcaagcccttcttcgggggtagcaccagcatcaaccagatctcgggaaagatcacgtcgggagaggaagtcctggcgagcctcagtggccactgggacagggacgtgtttatcaaggaggaagggagcggaagcagtgcgcttttctggaccccgagcggggaggtccgcagacagaggctgaggcagcacacggtgccgctggaggagcagacggagctggagtccgagaggctctggcagcacgtcaccagggccatcagcaagggcgaccagcacagggccacacaggagaagtttkcactggaggaggcacagcggcagcgggcccgtgagcggcaggagagcctcatgccctggaagccgcagctgttccacctggaccccatcacccaggagtggcactaccgatacgaggaccacagcccctgggaccccctgaaggacatcgcccagtttgagcaagacgggatcctgcggaccttgcagcaggaggccgtggcccgccagaccaccttcctgggcagcccagggcccaggcacgagaggtctggcccagaccagcggcttcgcaaggccagcgaccagccctccggccacagccaggccacggagagcagcggatccacgcctgagtcctgcccagagctctcagacgaggagcaggatggtgactttgtccctggcggtgagagcccatgccctcggtgcaggaaggaggcgcggcggctgcaggccctgcacgaggccatcctctccatccgagaggcccarcaggagctgcacaggcacctctcggccatgctgagctccacggcacgggcagcacaggcaccgaccccaggcctcctgcagagcccccgatcctggttcctgctctgcgtgttcctggcgtgtcagctgttcattaaccacatcctcaaataggagccctgggggcagagctcctggccagtcccgagccctccctcccaggcacccagcactttaagcctgctccatggaggcagagaggcccggcaagcacagccactgtgacggggagtccaggcgcaggagggacccggggccacaaggcgctgcgggcccaggtgtgctgggcccctctcaggggcactggcctctctgcagggccttccgcccagcgctggccttaatgctaaagccaaatgcagcttctgctgtgcgacgcactcctggccatcttgccgtgtcaccccctgtccggcctccacttgccatgggggatggatggatttagggtgggagggcctgtgggggccctggacagtcacaccccagcagcagtgagtgggcaggtttggaggagcagccagggagccccgagtggcccaggagtccccccacacacagatgcataggcctgccttccggagaccctgtccacattgccgggaccaccctggtggggccactggtgggtgccagggacaggttagggccactctggggaaggcattttggttttttattccacgctgtgctgtttggatgggagccccacagaggcaggtcctggaaccaccccacccccacacctggacgctcgctctggtgggggcacacgcaggtggaggtggttgtgggtgcaggtgtgtgcaggggtgtggggggcgcaggggtgtggcttagctggccccgcacccaggccggggaggctcaagttcgccactttactcagaccgatgcacagtcttcccattttacacttttttaataaacataattgcaatattttaggtgggctgcgagctgcagtcagccttcacgtctggcaaaaaaaaaaaaaaaaaaaaaaaaaaaaaaaaaaaaaaaaaaaaagggcggccgc

SEQ ID NO: 1936 - DNA, 910 bp, Homo sapiens; identical to SEQ ID NO: 520

SEQ ID NO: 1937 - DNA, 1700 bp, Homo sapiens
  misc_feature (38)..(38): n equals a,t,g, or c
ttaggtgacactatagaaggtacgcctgcaggtaccgngtccggaattcccgggtcgcccacgcgtcckggctgtcagagtcagggtaacacacaccaagagtggagtgcggccagcaagtttgagacctgcccgccctcctcgcagctctgctctgtgtcctcaggaagtcacagagtctactgaggcaaggagagggtgattctttccccaaatcccttcttccctggttcccaaaccaaagacagcctgcagccctttctgcatggggtgctctgttgacaggcttcccagatccctgagtctctctttccttcctcctcgatctttagttgtccacggtcaattcagtgcttccattgggggacagtcccctccgggatgacctgattcacctccagcccagggaatggaatctagaggaatacgtggggtgggtctggacaaggagcggcaggaatcaccacccatctccagctgtggagccctgtggaggggaaggggaagcttggggttcagagggractcttccaggagaggggtgcccagyggaggtaaagatgatagagggttgtggggggtctctagttgaatgttttggcccatgactttggaacatggctggcagcttccagcagaagtcamgctccccatcccccaggggacatrggacctttttcctgcttcctggtcactttcaaagaactatttgcgcaatctgtgggtctgtggattcacggggctttctgtgtgggtgctgcagttgcttttgtctgcagcagcaggacacatctttcctcttactcagccctttatggcccatggggaactccgtggctcagggagagctgaactccaggggtgtgacctgggacrggtgggcctgaggtgcccagctcagggcagccaggtggctcatgggctgtagtgagccagctccctgggggaaaaggctgtgggccgttaggaccatcctccaggacaggtgacctctatgaggtcacctacggctgtggccgtgcaggcctccttccagcccagagtggcccagtagagcaaggcagacagtgacctccacccccgcagccctcttaaaaggccagtactcttgggggtggggggagggtttagaaagcatttgcccatctgcctttctttcccccagcccccacccgctttgaatgtagagacccgtgggcacttttccttttgtggtggggggtgcggaggaggtacccccacccctggcacagccgcctggaatgcaggactgtcactgctgttcgggtgatgacctcgttgccaagctcctcctgtccccttgttctgggggcaggcgctgtgcttctgtgaggtggtttagcttttgctttcgaagtggccagctgcggccaccaggtctcagcacaagagcgcttcctttgcacagaatgagcttcgagctttgttcagactaaatgaatgtatctgggaggggtcgggggcacgagttgattccaagcacatgcctttgctgagtgtgtgtgtgctgggagagtcagagtggatgtagagcgcggttttatttttgtactgacattggtaagagactgtatagcatctatttatttagatgatttatctggtaaatgaggcaaaaaaattattaaaaatacattaaagatgatttaaaaaaaaaaaaaaaaaaaaaaaaaaaaaaa

SEQ ID NO: 1938 - DNA, 2547 bp, Homo sapiens
  misc_feature (6)..(6): n equals a,t,g, or c
  misc_feature (80)..(80): n equals a,t,g, or c
  misc_feature (89)..(89): n equals a,t,g, or c
  misc_feature (155)..(155): n equals a,t,g, or c
ggggtngcaggcttttttttggttttggggaaaccaggggaaggagggaattgggggaaaggattcaaccttttcttgcntcagtagantctgtgaatttcctgaggacacagagcagagctgcgaggagggcgggcaggtytcaaacttgytgnccgcactccamtcttggtgtgtgttaccctgactctgacagccaaggaaagacaggggagccggccttttccatgctccccttgggccccccaatctggttttgtctcccctacaggactggaagagagggagaagtcactcctcactggcagggaagcsacgggcccccaggacaccttgtacaaaccagaaaacaagtgcaccttgccaggggtgggctggggcaaagcctgcccattcacacagcacagcctgacctcaragaggcacggcasaggtccctccacaggaatacagctyagccccagctgtggcatttaggttggatggggaggggatgcagaatggaaggaggaaggggcttaggagtcaagggctgccctgagaacgtggtggracactccctccctccctgactgcccacrcctgggttggctgagttggaggggaggscagaaaaagaggggaattggaagggctgaaaagtcacctgagtcagaaagaacaagaacccctcacgggaggaaggacagggtccagacgtctcaaagcctgtgctgatacatcacacaacttagcagacgcctgcacacccgcagcctggcccggtgcagccgagaaaccacatctgtatgcctggagcatggggtgccatcgcacctgtgccagacccctgccctccgctgaaagccgcaagcaggtagcaaggtgcatgcaaggtggggtgagtgcaggtgtggtggtgaggtcttttgtgctgtgaatcaccccacgttcgcctggccagggtttctaacccaggttcgcaaggcccatgtggacacgtctgcagccacacatgctttcacggggcacatgggaacgtacacgcgaagggtaatgcgtgcacacctgtgcagccaggtgtgcatgagcgtttctgcacaggccaggtgatgaggggagggcagagctctcagcagaagggtctcagcggcgcctcctccctgggaaggatagaagcctctctgaaggggaagggactcgccccaagtaacctcaacccttcctcctgccccttcctcccgccccactcacttttggtcaaaaccagcctccacagcccaccgcaaagccagagaggagagttcaaggtaaagacccaattgaaacaagagaaaaggggaaaaccagccaaccaggctggggtggccactcaagggagagggtttgggccttccaatgctcctttaactcccagaaccagctgctgcgtcactagaggagaatgataatggtggtgtcccgggcaggtgatcctgtccycatcctgccctgggggtggtaccccaactcccagagcaactctctccatccccagcctgaggcctcgtggtaaacgtccctcagagaaagggcaggtggtgggagagtagtgggatcttctccccttttgctgctcggtatttttttaaataaaataattaccccgcccccaacccatccctatctctggaagtcccaccccaagcccaaaagaaaacagtttaagaagagtaaaaacggtgattcagaacttcccactgcggtctcggaagaagccctcagctgcctgggcctcgcggaaggtgacggtgatggagttggcggtgatgtcggtcacggtcacctcacttgaggggagcgcaggtgtccagggagggggcccctcggccaggtcggcatctgcctcctcttcaggggctcgcagcaggctcccactcgccagccgcctgcaggacgtctggggccggtggctcctgcaggaagagctcccgtcgatggctgtggctctccaggttgggcccgcggggcgggaacttcttgcgcgagagccgcaggtacttgtgggcctttcggggcttgcggagcgggaagggcagggtgggcaccaaggggcccttgtccaccagctcaggtgcccccgccttgaccaccccctcagggctcccgctgccgagtgggcacgtcagggagaagcagagcttctccttgcccttggccttgtgggagctccgcaggtccatgctgtacagccgctgcagcagaagccgttgggtttcggacctctcttcctataccccgatgctcggtctctctcctccttctcctcgtaggccatgacgaggcgggggtccaagatgtgctcttctggctcccacgtgctgtactttgggggccatcctttccacttcaccagatactcgactttacccttccgcacgcgcttcttccggatgctctccacggcgaacacctgctcgccgatggctgacagctccatgcggggcggcgggcgagcgggcccggggccgggccgggccgggggcggagctgcggggccgcggctgcggcgcgcgatgctggggctgg

SEQ ID NO: 1939 - DNA, 1423 bp, Homo sapiens
  misc_feature (47)..(47): n equals a,t,g, or c
  misc_feature (61)..(61): n equals a,t,g, or c
  misc_feature (812)..(812): n equals a,t,g, or c
  misc_feature (858)..(858): n equals a,t,g, or c
gaacaaaagctgcagctccaccgcggtggcggccgctctagaactantggatcccccgggntgcaggaattccccagaagcccgtgtttgaggagcgctacaccttcgagatccccttcctggaggcccagaggaggaccctgctcctgaccgtggtggattttgataagttctcccgccactgtgtcattgggaaagtttctgtgcctttgtgtgaagttgacctggtcaagggcgggcactggtggaaggcgctgattcccagttctcagaatgaagtggagctgggggagctgcttctgtcactgaattatctcccaagtgctggcagactgaatgttgatgtcattcgagccaagcaacttcttcagacagatgtgagccaaggttcagacccctttgtgaaaatccagctggtgcatggactcaaacttgtgaaaaccaagaagacgtccttcttaaggggcacaattgatcctttctacaatgaatccttcagcttcaaagttccccaagaagaactggaaaatgccagcctagtgtttacagttttcggccacaacatgaagagcagcaatgacttcatcgggaggatcgtcattggccagtactcttcaggcccctctgagaccaaccactggaggcgcatgctcaacacgcaccgcacagccgtggagcagtggcatagcctgaggtcccgagctgagtgtgaccgcgtgtctcctgcctccctggaggtgacctgagggctgcagggaaggcagctttcatttgtttaaaaaaaaaaaaaaaaaaagacggaaaaaaatgtntcacatactattacatccacacctgcatacacactcgcaacatgtntacacacgtccacacacacagacacacagataccccaaatcctctcagaactgagaggaagctgactattgatcacaaaatggccgccctcagtgagtgaggcctaggaactttccagaagccccatccatagatcacaagctcagtgggctctgccgtgggacttattggcagtgcctgcycttgtcaatactcctgccccaaaatgcactttcaaccctcaggccagagaaaggacctcccaaagggtgccaagctccatcaagactaaatttaccaagagtttggccagtgtgtgggagacttgaacaccccccacttccgaaacacacacctactgggtaacttctgaacaggctgctgttccctggggttcttcaaacctgatacctttctccaaaggtgtaagtatctttgtcttctccgtagtaaatgtgataactagattatgggccatttggagaaaccaaatggcaaccaaaactattccagtgtcagaagcctttcctggcttaacagaattgttcttgtgttagctcatcccagggaacgccctgtgggtatg

SEQ ID NO: 1940 - DNA, 811 bp, Homo sapiens
ggcacgagcggttgtccctgtctctcacccccttatcagccttagctgttctgtcttttacgacttctgctctttaggcaggtccaaaaggcagcatcattacctgttctatttaagcaattgtggtggtcagaaagtgcctgcttgcagagagttcctgcccacccccaccccatactcagtcctggcctgttctcagagccatctgatccctacctcatgtgataccagagatggtcctgctgctgctgctgctgctgtggccgccaggagagacagcaggtggtagggccgtcagtcagtggttgtggggattcagggccctgaactgggacctaggagatccaaaaaggtcagggaagttgctggtcttggccaaatgggccgtgctgtaggcatcagtggtggctgtctcaggccgactgcccacagatatgtgcagtctgctctcaggatcaggcacacgactttgggggtcaggtacaagagtagccactccaagtgtgggcttgttaagaactgttttcttttgaggcagggtctcgctatgtcccagtcatagctcactgcaacctcaaagttccaggctcaaggaatcctcccacctcagcctcccacatagctgggaccacaagcacatgccacagcacccagctaaattttttttttttttaagaggctgaggtgggcagatcgcttgagcccaggagttcgagaccagcctgaacaacatggcaaaaccctgtctctgcaaaaaataaaaaattagccgggtgtgattgcccatgcctgtaaaaaaaaaaaaaaaaaa

SEQ ID NO: 1941 - DNA, 1960 bp, Homo sapiens
  misc_feature (18)..(18): n equals a,t,g, or c
  misc_feature (43)..(43): n equals a,t,g, or c
  misc_feature (65)..(65): n equals a,t,g, or c
  misc_feature (85)..(85): n equals a,t,g, or c
atgatgttccatttactnggttcaccaaaaaccaccgactaangttcctttaacccatggcgggnaacattctggcgctggaaangatcaacgaacattctgcacctgcaaattagctggggtggatgggcgctgggcagccggattgccgggcatcattatgctgctggtcaccccgctggtgatttacaccatgtatccaccagaaattaagaaggtggataacaaaaccatcgctaaagcgggccttgccgaactaggwycgatgaaaatccgcgaaaaaatgctgctcggtgtctttgtgctggcgctgctgggctggattttcagtaagtctctgggggttgatgaatccaccgtggcaatcgttgttatggcaaccatgctgctgctgggtatcgttacctgggaagacgtggttaaaaataaaggcggctggaataccttaatctggtacggcggtattatcggcttaagctccttattatcgaaagttaaattcttcgaatggttagctgaagtctttaaaaataacctggcatttgatggtcacggtaacgttgctttcttcgttattattttcctcagcattatcgtgcgttatttcttcgcttccggtagtgcctatatcgttgctatgttaccggtatttgccatgctggcgaacgtctccggcgcaccgttaatgttaaccgcgctggcactgttgttctccaactcctatggcggcatggttactcactatggcggcgcggcaggtccggtcatctttggcgtgggttataacgatattaaatcctggtggttggtcggtgcggtactgacgatattaaccttcctggtgcatatcaccctcggcgtgtggtggtggaatatgctgatcggctggaacatgctgtaaatattctcgtcatacttcaagttgcatgtgctgcgtctgcgttcgctcaccccagtcacttacttatgtaagctcctggggattcactcgcttgtcgccttcctgcaactcgaattatttagagtatatccatttattatctttctgcgcacttcacggtgcgcagatatctggagcatttgatgatcaagttatctgaaaaaggcgtgtttctcgccagtaataacgaaataattgccgaagaacatttcaccggcgaaattaaaaaagaagaagccaaaaaaggcactattgcctggtctattctctcttcgcataatacgtccggaaatatggataaacttaaaattaagtttgattcattagcctctcacgatattacctttgttggtattgtacagaccgctaaagcgtccggtatggaacgtttcccgctgccgtatgtgctgaccaactgccataactcactctgcgccgtcggcggcactattaacggtgatgaccatgtttttggtttatcggcggcccagcgttatggcggtatttttgtgcctccgcatattgcggtcatccatcaatatatgcgtgagatgatggcaggcggcggcaaaatgatcctcgggtcagacagccacacccgttacggtgcattagggacaatggcagtcggtgagggcggcggtgagttggtaaaacagctgcttaatgacacctgggatatcgactatccgggcgtggttgcggtgcatctgaccggaaaacctgcgccgtatgtggggccacaggatgtggcgctggctatcattggcgcggtgttcaaaaacggttacgtcaaaaacaaagtcatggagttcgttggaccgggcgttagcgcgctctctaccgatttccgtaacagcgttgacgtgatgaccactgaaacgacctgtttaagttctgtctggcaaaccgatgaagaagtccataactggytggcgctgcacggtcgsggccaggattactgccagyttaaccctcaaccgatggcgtactacgatggctgcatcagcgttgatttaa

SEQ ID NO: 1942 - DNA, 913 bp, Homo sapiens
  misc_feature (8)..(10): n equals a,t,g, or c
  misc_feature (15)..(15): n equals a,t,g, or c
  misc_feature (17)..(17): n equals a,t,g, or c
gggggggnnnattgnangggcactccyyggaccgggcgttagcgcgctctctaccgatttccgtaacagcgttgacgtgatgaccactgaaacgacctgtttaagttctgtctggcaaaccgatgaagaagtccataactggctggcgctgcacggtcgcggccaggattactgccagcttaaccctcaaccgatggcgtactacgatggctgcatcagcgttgatttaagcgccatcaaaccaatgattgcgctgccgttccacccgagcaacgtgtatgaaatcgacacactgaaccagaacctgaccgacattctgcgtgagattgaaattgagtccgaacgcgtggcgcacggtaaagccaaactctcgctgctggataaagtggaaaatggtcgcctgaaagtgcagcaggggattatcgcgggctgttctggcggtaactacgaaaacgtcatcgcggcggcgaatgcactgcgcggtcaatcctgtggcaatgacaccttctcgctggcagtttacccgtcatcacagccggtgtttatggatctcgccaaaaaaggtgtggtagcagatttgattggcgcaggcgcaatcatcagaaccgcgttctgcggcccatgctttgcgcgggcgatacgccaatcaacaacggtttgagtattcgccacaccacgcgtaacttcccgaaccgcgaaggctctaagccagctaatgggcagatgtcarcggtggcgttgatggacgctcgttctatcgctgcgactgcggcaaacggtggctatttaacctctgccagcgaacttgattgctgggacaacgtgccggagtacgccttcgatgtaacgccgtataaaaaccgtgtttatcagggctttgtgaaaggggcaactcagcaaccgctgatttacg

SEQ ID NO: 1943 - DNA, 1308 bp, Homo sapiens; identical to SEQ ID NO: 1047

SEQ ID NO: 1944 - DNA, 1285 bp, Homo sapiens
  misc_feature (1213)..(1213): n equals a,t,g, or c
  misc_feature (1217)..(1217): n equals a,t,g, or c
  misc_feature (1252)..(1252): n equals a,t,g, or c
  misc_feature (1270)..(1270): n equals a,t,g, or c
  misc_feature (1272)..(1272): n equals a,t,g, or c
  misc_feature (1275)..(1275): n equals a,t,g, or c
  misc_feature (1278)..(1278): n equals a,t,g, or c
gcccacgcgtccggcccgagtttctgcgaagccgcgacctcggcgtccggacgcggggaacaccgggctgagggagtctgcagtcggctccgggaagccgcgcggcgacgggggaggccttcactaaaggggaaaaggaagagggggtcggccagtatccccgaaagagggctagggcgcatgaagaccagcgcagagctccacgagcaggaaaagcccccaagcagccccagggcgactggaccgggccgcttaggccacgcccggggaagagggcctgacgcgctgcggggcggggccgcggggccgggtcgcgcgagcagcggagcaccaagggaacggaaaatggcgcctcacggcccgggtagtcttacgaccctggtgccctgggctgccgccctgctcctcgctctgggcgtggaaagggctctggcgctacccgagatatgcacccaatgtccagggagcgtgcaaaatttgtcaaaagtggccttttattgtaaaacgacacgagagctaatgctgcatgcccgttgctgcctgaatcagaagggcaccatcttggggctggatctccagaactgttctctggaggaccctggtccaaactttcatcaggcacataccactgtcatcatagacctgcaagcaaaccccctcaaaggtgacttggccaacaccttccgtggctttactcagctccagactctgatactgccacaacatgtcaactgtcctggaggaattaatgcctggaatactatcacctcttatatagacaaccaaatctgtcaagggcaaaagaacctttgcaataacactggggacccagaaatgtgtcctgagaatggatcttgtgtacctgatggtccaggtcttttgcagtgtgtttgtgctgatggtttccatggatacaagtgtatgcgccagggctcgttctcactgcttatgttcttcgggattctgggagccaccactctatccgtctccattctgctttgggcgacccagcgccgaaaagccaagacttcatgaactacataggtcttaccattgacctaagatcaatctgaactatcttagcccagtcagggagctctgcttcctagaaaggcatctttcgccagtggattcgcctcaaggttgaggccgccattggaagatgamaaattgcmctcccttggtgtagacaaatacagttcccattggtgtngtgnctatwataaacacwttttycttttaamaaaaamanaaaaaaaggggcggccgntntanagnatccaag

SEQ ID NO: 1945 - DNA, 1973 bp, Homo sapiens
ttgatcsccakctcgaattaaccctcctaaagggaacaaaagctggagctccccgcggtggcggccgctctagaactagtggatcccccgggctgcaggaattcggcacgagatagtctttcaaatttggacatttaaaaaagaaacttttactgtagtcatgaagtagtatcaaagtttaccacaagtttgtattgagagaagaacaaacaatatatgctaatatgaaaaacagctctacttagaaagctactgcttgggttttcttattaggcatagttctccagactgagttggttttactcatctacatgatttttccttgccttatggaacagaaattcaggcccactcgaattcagttattttagggctctttaaaatccagtatttgtgatttaaatgatgcggagggactttcattacctgtgtctttgcttatttctctctggccctcagaacaccccaccctgacctttaggggaaattgacagaggcagagggtttcacctgcctcaattgtcaccagccctgttacattcttccttccaagccttagcctcacagggaccttctcattattgaacaattgccttcaaagcagtagaatagcccaattgttatggagattaaagataccgattgcaaaactcctgtaaataaaatcttcactgacaaacccagtttcttttcataggcttttcttctgtaatctctttctggcagaacatctcatgttttgatgttagagattcagttaccaaccacagtaaataaagcaaaataataatagaaaaatagtatagaactcaccctaaaaacaaacattggccaaccatgtttattttttgtctctctttgcactcctgagaattgataggggaagaatgtaccacctctaattcaggtgatttctgattagcaagctatggaaagtcttcaggttgagttttagccagttcacgctcccctaaatggcatggaatagactattttctgttttaagaaaaaatagaacaatggcactaaatgcttgactgaatgtttgactaaatgttgactgaatcatggataggaaagattgggcagaaaagacagccactgcctccagacacaggatgccacaatcctgggcaccatcattattccatacaaccttagggtcatttttagggtttagaactttctcaatagggtttcaagattttgaaaagtgtcttccaattctgatctccgtagatcctgttatgggaattaacctttttggaaggggattcttgttcttaaagatgaaattccctactttctttcctggagggaatcagtatgggcagagggaagaggagatggcgattctgacctgtgtgtctcatgtcacctaacacctatggggtggcatgaaacttgagctttaaaacacaccaggggccaggcacagtggctcatgctggtaatcccagcactttgggagaccgaggtgggtggatcacctgaggtcaggagttcgagaccagcctgccaacatggcaaaaccccgtctctactaaaaatacaaaaatcagctgggtgtggtggcgggcacctgtaatcccagctacttgggaggctgaggcaggagaatcgcttgaacctgggaggcagaggttgcagtgagccgagatcaggccattgtactctagcctgggtgacaagagtgaaactccatctgaaaaaaaaaaaaaaaaaactcgagggggggcccggtacccaattcgccctatagtgagtcgtattacaattcactggccgtcgttttacaacgtcgtgactgggaaaacctggcgktacccaacttaatcgccttgcagcacatccccctttcgccagctggcgtaatagcgaagaggcccgcacccgatcgsccttccaacagttgcgcaacctgaatggcgaatggcaaattgwaagcgktaatattttggtaaaattcscgg

SEQ ID NO: 1946 - DNA, 261 bp, Homo sapiens
gggccacccagcgccgaaaagccaagacttcatgaactacataggtcttaccattgacctaagatcaatctgaactatcttagcccagtcagggagctctgcttcctagaaaggcatctttcgccagtggattcgcctcaaggttgaggccgccattggaagatgaaaaattgcactcccttggtgtagacaaataccagttcccattggtgttgttgcctataataaacacttttttcttttaaaaaaaaaaaaaaaaaa

SEQ ID NO: 1947 - DNA, 1214 bp, Homo sapiens
aaatattctagacatttacccaaactctagttcaacatatactcaacttgcactgtatatctccctgtcttttttgagacagagaagaaattcaggaggttccccatctccagagtttctctgttggaaagcagtatcaagaagcctttaaaaaattgttgttaagctttgccacctgcagaaatgcattgccccacattattcttctggggttaaagtagtaagtttggttgaggaaggaagtcaaaacagtcagtaatgatttctgttctcttatgcatattcgtgtatacatgggcaactgaatctagcaaggactctttcgtgtcacaccttaaaatcttcatgctgtagtcactccagaccatggagtggctttccagctgaatgaatcctatgtctcgcgtgcaggtggttggttttcaatgttcttgctaattttttttctattggatcttgggagttttctttgtttgctcctgtgtttgcccagctttaataaaaccaggcgcaaacaaaaaccatagcattctgaaacaatagggggcccacattggacccagtatgtcactttaatggacttcaagaaaaaatctgaatgggaaaaatgacactagaatgtatactccacacattttatgccatataatggtgtgttttcttaattttgtttcttgtggcgaaatgtggctttcaaattaaaatgaccttttcttctttgaaactttttgttttgacttgtataattaagggtttggaaagattcataattctgagagaggtttgcaaccaggagatacaaagaagtctcagtagtaatcttgttcatgtgcttttacagccagctacatttaagaatgtattagttacagaaattatatgtctgtgtatgtgtctctactcaataaagtacatgcctccacataatgcggtgctgtccatctcggcaaatactggccaagtccctttatgacaggcacacagaaaccatagcatggtctggctttcagaaaatgcctctcatctttcctggaaccttattttgctaaatgtctgttttcttgtgatttgttgtacctcacagcaccattgtgaccatggtgatgcctcatttgcatgatatgtaccttgtgtttaatgtgaaatacattttcattgaagagtcaaaaaaaaaaaaaaaaaaaaaattctcggtcgcaagggaattcgctggt

SEQ ID NO: 1948 - DNA, 604 bp, Homo sapiens
ggcacgagaaatcttcatgctgtagtcactccagaccatggagtggctttccagctgaatgaatcctatgtctcgcgtgcaggtggttggttttcaatgttcttgctaattttttttctattggatcttgggagttttctttgtttgctcctgtgtttgcccagctttaataaaaccaggcgcaaacaaaaaccatagcattctgaacaatagggggcccacattggacccagtatgtcactttaatggacttcaagaaaaaatctgaatgggaaaaatgacactaggaatgtatactccacacattttatgccatataatggtgtgttttcttaattttgtttcttgtggcgaaatgtggctttcaaattaaaatgaccttttcttctttgaaactttttgttttgacttgtataattaagggtttggaaagattcataattctgagagaggtttgcaaccaggagatacaaagaagtctcagtagtaatcttgttcatgtgcttttacagccagctacatttaaggatgtattagttacagaaattatatgtctgtgtatgtgtctctactcaataaagtacatgcctccacaaaaaaaaaa

SEQ ID NO: 1949 - DNA, 785 bp, Homo sapiens
ggcacgagaggagacggggtggcctttcccacaggggcagcctgtggcgatgtggcagctgggcctcaccccggcaggctgtgcgtgaccccctgagtgggggaaggcaggctgttgccatggtattcctccagggtgaagtgggagatatttatacccggggtcaggccgcgagcgggcgggcggagagggcagggagctgggatttcgcggggcacagtgaggccgggcatgtaggcaggtgggacttgggcgtgccctgctgtctcctgctctgtgtttgtgtgaggcagcgcctcctctgccctgcccgattgggacaatggcgtctcttggccacatcttggttttctgtgtgggtctcctcaccatggccaaggcagaaagtccaaaggaacacgacccgttcacttacgactaccagtccctgcagatcggaggcctcgtcatcgccgggatcctcttcatcctgggcatcctcatcgtgctgagcagaagatgccggtgcaagttcaaccagcagcagaggactggggaacccgatgaagaggagggaactttccgcagctccatccgccgtctgtccacccgcaggcggtagaaacacctggagcgatggaatccggccaggactcccctggcacctgacatctcccacgctccacctgcgcgcccaccgccccctccgccgccccttccccagccctgcccccgcagactccccctgccgccaagacttccaataaaacgtgcgttcctctcgamaaaaaaaaaaaaaaaaaact

SEQ ID NO: 1950 - DNA, 500 bp, Homo sapiens
ggcacgagtttcagcaggggacagcccgattggggacaatggcgtctcttggccacatcttggttttctgtgtgggtctcctcaccatggccaaggcagaaagtccaaaggaacacgacccgttcacttacgactaccagtccctgcagatcggaggcctcgtcatcgccgggatcctcttcatcctgggcatcctcatcgtgctgagcagaagatgccggtgcaagttcaaccagcagcagaggactggggaacccgatgaagaggagggaactttccgcagctccatccgccgtctgtccacccgcaggcggtagaaacacctggagcgatggaatccggccaggactcccctggcacctgacatctcccacgctccacctgcgcgcccaccgccccctccgccgccccttccccagccctgcccccgcagactccccctgccgccaagacttccaataaaacgtgcgttcctctcgaaaaaaaaaaaaaaaaaaaaa

SEQ ID NO: 1951 - DNA, 501 bp, Homo sapiens
ggcacgagctttcagcaggggacagcccgattggggacaatggcgtctcttggccacatcttggttttctgtgtgggtctcctcaccatggccaaggcagaaagtccaaaggaacacgacccgttcacttacgactaccagtccctgcagatcggaggcctcgtcatcgccgggatcctcttcatcctgggcatcctcatcgtgctgagcagaagatgccggtgcaagttcaaccagcagcagaggactggggaacccgatgaagaggagggaactttccgcagctccatccgccgtctgtccacccgcaggcggtagaaacacctggagcgatggaatccggccaggactcccctggcacctgacatctcccacgctccaactgcgcgcccaccgccccctccgccgccccttccccagccctgcccccgcagactccccctgccgccaagacttccaataaaacgtgcgttcctctcgaaaaaaaaaaaaataaaaaaa

SEQ ID NO: 1952 - DNA, 1330 bp, Homo sapiens
cccacgcgtccggctctgagcgcctgcggtctcctgtgtgctgctctctgtggggtcctgtagacccagagaggctcagctgcactcgcccggctgggagagctgggtgtggggaacatggccgggcctccgaggctcctgctgctgcccctgcttctggcgctggctcgcggcctgcctggggccctggctgcccaagaggtgcagcagtctccccactgcacgactgtccccgtgggagcctccgtcaacatcacctgctccaccagcgggggcctgcgtgggatctacctgaggcagctcgggccacagccccaagacatcatttactacgaggacggggtggtgcccactacggacagacggttccggggccgcatcgacttctcagggtcccaggacaacctgactatcaccatgcaccgcctgcagctgtcggacactggcacctacacctgccaggccatcacggaggtcaatgtctacggctccggcaccctggtcctggtgacagaggaacagtcccaaggatggcacagatgctcggacgccccaccaagggcctctgccctccctgccccaccgacaggctccgccctccctgacccgcagacagcctctgccctccctgacccgccagcagcctctgccctccctgcggccctggcggtgatctccttcctcctcgggctgggcctgggggtggcgtgtgtgctggcgaggacacagataaagaaactgtgctcgtggcgggataagaattcggcggcatgtgtggtgtacgaggacatgtcgcacagccgctgcaacacgctgtcctcccccaaccagtaccagtgacccagtgggcccctgcacgtcccgcctgtggtccccccagcaccttccctgccccaccatgccccccaccctgccacacccctcaccctgctgtcctcccacggctgcagcagagtttgaagggcccagccgtgcccagctccaagcagacacacaggcagtggccaggccccacggtgcttctcagtggacaatgatgcctcctccgggaagccttccctgcccagcccacgccgccaccgggaggaagcctgactgtcctttggctgcatctcccgaccatggccaaggagggcttttctgtgggatgggcctgggcacgcggccctctcctgtcagtgccggcccacccaccagcaggcccccaacccccaggcagcccggcagaggacgggaggagaccagtcccccacccagccgtaccagaaataaaggcttctgtgcttcaaaaaaaaaaaaaaaaaaaaaaaaaaaaaaaaaaaaaaaaaaa

SEQ ID NO: 1953 - DNA, 1102 bp, Homo sapiens
agttaggtgacactatagaaggtacgcctgcaggtaccggtccggaattcccgggtcgacccacgcgtccggacccacgcgtccgcccacgcgtccggtgcttgctatgacatctggtcaaatgtggaaccatataagaggaccaccatatgcccataagaatccccacacgggacatgtgaattatatccatggaagcagtcaagcccagtttgtagctgaaacacacattgttcttctgtttaatggtggagttaccttaggaatggtgcttttatgtgaagctgctacctctgacatggatattggaaagcgaaagataatgtgtgtggctggtattggacttgttgtattattcttcagttggatgctctctatttttagatctaaatatcatggctacccatacagctttctgatgagttaaaaaggtcccagagatatatagacactggagtactggaaattgaaaaacgaaaatcgtgtgtgtttgaaaagaagaatgcaacttgtatattttgtattacctctttttttcaagtgatttaaatagttaatcatttaaccaaagaagatgtgtagtgccttaacaagcaatcctctgtcaaaatctgaggtatttgaaaataattatcctcttaaccttctcttcccagtgaactttatggaacatttaatttagtacaattaagtatattataaaaattgtaaaactactactttgttttagttagaacaaagctcaaaactactttagttaacttggtcatctgattttatattgccttatccaaagatggggaaagtaagtcctgaccaggtgttcccacatatgcctgttacagataactacattaggaattcattcttagcttcttcatctttgtgtggatgtgtatactttacgcatctttccttttgagtagagaaattatgtgtgtcatgtggtcttctgaaaatggaacaccattcttcagagcacacgtctagccctcagcaagacagttgtttctcctcctccttgcatatttcctactgaaatacagtgctgtctatgattgtttttgttttgttgtttttttgagatcacgstactgggctc

SEQ ID NO: 1954 - DNA, 760 bp, Homo sapiens
  misc_feature (689)..(689): n equals a,t,g, or c
  misc_feature (757)..(757): n equals a,t,g, or c
gcttatagaagggagaggagcgaacatggcagcgcgttggcggttttggtgtgtctctgtgaccatggtggtggcgctgctcatcgtttgcgacgttccctcagcctctgcccaaagaaagaagkaakatggaatttctctttaataaaactggatgggcttttgcagctttgtgttttgtgcttgctatgacatctggtcaaatgtggaaccatataagaggaccaccatatgcccataagaatccccacacgggacatgtgaattatatccatggaagcagtcaagcccagtttgtagctgaaacacacattgttcttctgtttaatggtggagttaccttaggaatggtgcttttatgtgaagctgctacctctgacatggatattggaaagcgaaagataatgtgtgtggctggtattggacttgttgtattattcttcagttggatgctctctatttttagatctaaatatcatggctacccatacagctttctgatgagttaaaaaggtcccagagatatatagacactggagtactggaaattgaaaaacgaaaatcgtgtgtgtttgaaaagaagaatgcaacttgtatattttgtattacctctttttttcaagtgatttaaatagttaatcatttaaccaaagaagatgtgtagtgccttaacaagcaatcctctgtcnaaactgaggtattgaaataattatcccttaacctctctcccagtgacttatggaccattaattagtcnaat

SEQ ID NO: 1955 - DNA, 2731 bp, Homo sapiens; identical to SEQ ID NO: 433
  misc_feature (2615)..(2615): n equals a,t,g, or c

SEQ ID NO: 1956 - DNA, 591 bp, Homo sapiens
  misc_feature (584)..(586): n equals a,t,g, or c
  misc_feature (590)..(591): n equals a,t,g, or c
taacattctgaaattgaactaaacagtaaattctgttgaaatgttttcaaagaggcaaaatattatattggaatcaatgaagaaagtaaattatcttggctaattttattagtggtaattgtagtgaaaggttttcctaaatattataagcaaattccttttctcccccgtctcaaatgaaaggaaatgggggtaaattaatctgactgtgattggttttgttttatgctgatcttgaaagcttgatgttgctgctgctcctctatacagtacagatcagttgtgggggtgcwatgagggtagccgtgaatagtggtgccagtaggggtggagcgggagggatgatgccagcctgagctagccaggttctttgattagggcattggatgtgaaatgtaaaatgctctctccttttcttctatcagctgttcagaggagactcattacaactcctgctgaagctcctaatcttcttcccttctcttctaccctttccccctaccctcacttggcctgaagacgttctccccagagtttaccttgctcccctggtgctatgtgtaggtgaaccggcgtaggcgcannnaaann

SEQ ID NO: 1957 - DNA, 1522 bp, Homo sapiens
ggcacgagagcgcctggagccacacagggatccggagcctgggggaaaagcggcgcgggagccggcacccaccgctggaggggcggcgacggcggccgtagcgacctcgggaggcaagcggagccgccatggccgagttcccgtcgaaagttagcacgcggaccagcagtcctgcgcagggcgccgaagcctcggtgtcggcgctgcgcccggacctgggcttcgtgcgctcccgcctcggggcgctcatgctgctgcagctggtgctggggctgctggtgtgggcgctgattgcggacaccccgtaccacctgtatccggcctatggctgggtgatgttcgtcgctgtcttcctctggctggtgacaatcgtcctcttcaacctctacctgtttcagctgcacatgaagttgtacatggttccctggccactggtgttaatgatctttaacatcagcgccaccgttctctacatcaccgccttcatcgcctgctctgcggcagttgacctgacatccctgaggggcacccggccttataaccagcgcgcggctgcctcgttctttgcgtgtttggtgatgatcgcctatggagtgagtgccttcttcagctaccaggcctggcgaggagtaggcagcaatgcggccaccagtcagatggctggcggctatgcctaaaccacctgtgccacggccccctctggggctgaagccgccgctgggtcacagagcagggtcaccctgcaagcctgaagctggggagccctgcgtggagtcagcccaacagggactgcatttgctcctctctgcccgtcagayataagctctcacagcgctaaggaagcaggcccaggctggcaggcatctcggcttgcaggaggccaactgctgagacctcttctccatcccccttattcagtggaagatgacgggggatctgaggctgtgtctctgccttgtctttagaggacttcagcgtccaagactggggcccacccttctcaccagcactaaatgcactaacaaggactccagacctgcagccccagacccgccgtagtataagcctaacaagcaacacgtagcaccttagtctttgttccaggagagctgagcaagctggtgaaaccactctccttcctttaaacaccgtttcaaccaacctctccctggagccaacctgtaaaaagtgggttgattgctgacagcatggtcttccctccctgcatttcagacataccagttactgaaagcaaatcagttttaagtgatttctcagtgctgaaaagcctgtccaggtttccttccctttcccaagcctctctctgtaatactccctttgggcgaagctaacatcggtgcctccccgaccttgctgactaggcacatgggacgcaaaggagggagggaagcaaggccttgcctggcgagttgtcatgtggttggtggtgactgttttattttttttaataaaaataaagatgagagaaattaaaaaaaaaaaaaaaaaaaaaamaaaaaaa

SEQ ID NO: 1958 - DNA, 1014 bp, Homo sapiens
ggccgagataattctggaagtgatggattcccaccatatgcctataaaatgttagaatatatttttctagggagaaggttcacacttgtcatcaatttctcaaagtatcggtaatgggctggggcagaaagcccaggggttaagatcagctgttccataaatttcaaactgagtcattttggttttatctcagtttggcagttactaaatagacttagtcaaaggaggataattgaaaaaggacaggcagtccaggaagagactaaggattcttgaatacagaagggaccttttgaacactttacatgcctacgcacctgaaatgttagtattaacttttgtttcagtataccatttgaatgtgtttatgtatctaatggtattttgtgggtgcttttcatgatcagcaatggcatttgtactgaattacatttttttctgttaataggacttaattaaaagtactgcctacagtgtagtttaaattttgtaaacgagagaaaaaattctgcataaaggttcatgaatgtgtgggcaggattaaatataccaaccaatcctgttaaaaatggctgggttttagttttatattttgcattctactgtgtcatggtatgtactggtagtaatggtagaaacgtagaatctatacacacacacacacacacacagacacacacacacagacatgtgtccatgttttaaagcacttagtaatggcaagagtcctttttatgtatgtaaagatgtgatttctgattacatttattactcaattttcttgaaaagttaaggatgcttaattgttaacagcagttagttaaaagcagaagatagcattttaagggagctgacatgggaggatcacctgagcccaggaattcaaggctgcagtgagccgaaatcatgttattgcacactacactccagcctgggcaagagagaaaagactctgtaaaaaaaaaaaaaaaaaaaaaaaaaaaaaaaaaaaaaaaaaaaaaaaaaaaaaaaaaa

SEQ ID NO: 1959 - DNA, 575 bp, Homo sapiens
  misc_feature (8)..(8): n equals a,t,g, or c
  misc_feature (54)..(54): n equals a,t,g, or c
  misc_feature (564)..(564): n equals a,t,g, or c
cattgtcnccaattctcttagcagcccgggtctttcggtcctaaaggcctgcancttttcccctgcagccaggcttggtatcaagccctgcctgtggtcctctgcttttatacccactaagcaatagtggaagaatccmcaaamcaactcctcccccctcctcacttggggagcagaaccaatgatgggctcaggaacaggccagaagaacttgcactcaccattcaatctctttaggatcgcggtccttcagaagctcttgcacctcctgtcggcagcgctcctggtattctgggtgcctcgcaaggttgtacaggacccaggagaggccactggccgtggkgkcatggcctccaaacatgaaggtgtcagcctctgctcttatatcctcatctgacaatgccttcccatcttcatccttgctcagcagaagcacatcaatgaaatccaaagtcttggacttggctttgtctttgaaaaaatcatcaataccctgagtggggagggtgcgacgccgctcccggatgacagcgtctgtgaagtcatgcaccaggcggcaggccntgggaggcggc

SEQ ID NO: 1960 - DNA, 557 bp, Homo sapiens
  misc_feature (11)..(11): n equals a,t,g, or c
aagaggaaaanaggtttgtgttcrggaaggaatgttttaarggaggagwwttagagggagaaaartgaggagascaagwtaagagaggagggaagacagaaggagacagagagagaaatgagagagaaaaggaactgaagttgtgatgagataataactatggtagtgaaagcagagtctggctgtggaaaatatgggaaaatggtaatggcttccattttaacccaaaggcaatgggaagccataacaagtggttgagcaggggaggggcaggtcatatctgggcaccagaaagatcttttcagagctactatggagagaggaccagctgtagaatgaagtcccagtgaagacattctgggacctgagccagggcaggggctggggatggagaggaggcaatggactggacatgtgttttggaggccgtgtcctcccgtccaagcctttgctcagcacagcagtcctaaaaggtggcaacactttttatgcttttaaaaaccaagatatcaagtaatactgtgcactttgtaaacaaaaaaaagtgtctaaaacat

SEQ ID NO: 1961 - DNA, 761 bp, Homo sapiens
  misc_feature (8)..(8): n equals a,t,g, or c
  misc_feature (12)..(12): n equals a,t,g, or c
  misc_feature (19)..(19): n equals a,t,g, or c
  misc_feature (32)..(32): n equals a,t,g, or c
  misc_feature (42)..(42): n equals a,t,g, or c
  misc_feature (74)..(74): n equals a,t,g, or c
ttgttaanaganttggtgncaatgtgtaaggncagataatgntactttgcacatgttcagcaaatgacttcccntccactctgtttctgttctcccagaaatatcagttttttcgaaaatcctcacttcttgaatgtttgctcaggtgggaagggagaagttgtttttgtcaattcttccattattgcttagtagtactaggagcagagcacagaggcagaacttggtatccaacctggctagcaggggaaagttttcagacttttgggacagagagtcctagcccgctgagagaactaaggacaatatatgaaggcagacgatgacatctagacatgttcagtcaatgaattttcccttcactcctttcttgtttactctgaattatcatatttttttcaaacatctttacttcctgaatgtttactcttctgttccctaattcctaccctccggtccagtccagggagtcctaagggagacctgggggtaaaagtcatctatcttttgtctagaacacctgcatcgttcatccattcagtcttcattcagcaaactcttccacatgcctttccattgccagttctgttcccacacctttctgttctctggagacctggaaagaaccctgcctatggatgtgttttccaggtactcccagcctagtaggaacagtcccccacaagacattcccagtccacataggcaaggatggagttgagagcaagagaagcatggctgggagwcagaaagtgtgatag

SEQ ID NO: 1962 - DNA, 1533 bp, Homo sapiens
  misc_feature (21)..(21): n equals a,t,g, or c
ctgtcttccaggaaatcaggngagagagagagcgaaagaatagccaaatccccaaacaggccagttttaaccagcatgatgaagtgtccttggttttaacctttataaggaaagcagctttgagatgaccagtctggtttttgttctttgtgtctgctttcctcagcccttttctgtctataaagccaacctcctccgctcagctcatgggaacactcattctattttatagaatgacatgttgcccaattctagaatcaaaaataaaggccaactaagatcttcaaagtaaatttgttgtaattttatcttttgagaagacatatgggggctgctgaaaagttggtatctcaaataaagtctgaagatcacggctcagcccagattgttcccctggccaactccacaggtttgaacctggcattctggacaccagctatgcctcctccatttctcagaaaacctttgatcttgtgtgtctttcttcctactgaagggaattgtgggggcagttctttggccttcttgctgaactttgctggaaatagcccacaatttttatcagaggttagaactgtacattatcagagagactggacactttatcccctagcaaagtgggagaagattttaccagctcattccactccaccctggccttcccccaccccccatccccagcagcatttccatggaaatccagatggtcgtgtagtgttatggctctcttgtgatagactggccttcatattggagagctagggagagcccctgggagggagagagataaggcgctatctgccttcaatcagaaccttcggtttaaaatcatctaagagtctatacttgtgtgtacatacgtatttatttttatttatttttatacaattccattggcatggtccttcaccgaccctatgatttgcactttttatttctatgtgtgccacacacaatgcagtattaatggcaaccaggtaaatattgatttattttttaaagcttttcttcagtgttttgtcaaccatttcaaagtgtctcccaaaaaaggatgctgaagagcaattgctcccttaagcaacagattcatatttaccctgggttaatacaacaaaaggcctgtataattgtcttttcattgttaacacccaaaatagcatctatctagacagtatccccaaagaatttggaaaatctgatggtgtgagcagcagccgttagtatcagggtttcccattcttggacagtccgaggctgtgacctgttagataattagattatacttgaactggaccagagtttgttttttgaatttatgagaaaaaccaaaacactaagttaagtttgaacttgtaaagtattgaaatttgttgagtgtcctataaattgtcactacttttcctgatctgtataactgactgcaaagtgtttgtttttacaaaagagaaaagaaaagatttttaataaagagaatttgaaagctgaaaaaaaaaaaaaaaaaaaaaaaaaaaaaaaaaaaaaaaaaaaaaaagg

SEQ ID NO: 1963 - DNA, 1146 bp, Homo sapiens
ttgttcccctggccaactccacaggtttgaacctggcattctggacaccagctatgcctcctccatttctcagaaaacctttgatcttgtgtgtctttcttcctactgaagggaattgtgggggcagttctttggccttcttgctgaactttgctggaaatagcccacaatttttatcagaggttagaactgtacattatcagagagactggacactttatcccctagcaaagtgggagaagattttaccagctcattccactccaccctggccttcccccaccccccatccccagcagcatttccatggaaatccagatggtcgtgtagtgttatggctctcttgtgatagactggccttcatattggagagctagggagagcccctgggagggagagagataaggcgctatctgccttcaatcagaaccttcggtttaaaatcatctaagagtctatacttgtgtgtacatacgtatttatttttatttatttttatacaattccattggcatggtccttcaccgaccctatgatttgcactttttatttctatgtgtgccacacacaatgcagtattaatggcaaccaggtaaatattgatttattttttaaagcttttcttcagtgttttgtcaaccatttcaaagtgtctcccaaaaaaggatgctgaagagcaattgctcccttaagcaacagattcatatttaccctgggttaatacaacaaaaggcctgtataattgtcttttcattgttaacacccaaaatagcatctatctagacagtatccccaaagaatttggaaaatctgatggtgtgagcagcagccgttagtatcagggtttcccattcttggacagtccgaggctgtgacctgttagataattagattatacttgaactggaccagagtttgttttttgaatttatgagaaaaaccaaaacactaagttaagtttgaacttgtaaagtattgaaatttgttgagtgtcctataaattgtcactacttttcctgatctgtataactgactgcaaagtgtttgtttttacaaaagagaaaagaaaagatttttaataaagagaatttgaaagctgaaaaaaaaaaaaaaaaaaaaaaaaaaaaaaaaaaaaaaaaaaaaaaa

SEQ ID NO: 1964 - DNA, 2415 bp, Homo sapiens
ggcacgagatcatttattcctcgatgtctgctttaaaaagcaaagtcatatttatgtcttccaatgtctattgcaaagaaaagtaaacacgaagaagaattttgcttgagtccatgctttgccgctaatttattgagtgataaaagtaaattctctcactcttagtttcttatttgaataataggtataaataatgtctcccctcgtctctcaacagattttctttattagatttagaaattatatggcatatgtcaaaatcatgtacacagcatacatctttaaaatcaatgacaatatttagttccagtggcatgatagatgtctcagtaaggtaatgaaacccttgctgaagtgatgctctctgcaactgcagctctagcttccccatcggatgagtcggtggaatgcaggggatcacagaaagcaggtagcacgcttcccacacaggtgctactgagctacacagtaggaaatccaatgagacacaggatgggcatcctgacacacagtctatgtgatggaatgcaactttgtcttgatcaaaaattgtataaaaagattttctaataaaccaatttgtgaggaaaaatttaatcaggatatatttactcttacaaagaattctcagtcttttccacgttcctgtatttgtcgtgaaattttcctgtactagaactctgtggtgccatatgtgataatcccattctaatttccagcatagagtatattaggactctcatgtttcaaaggctaaatggtctgagctttaactcagtgcctcatcttcattttacctcaagactaatgaaagacagtgaaagagagaatgacagaaaattccctcataatttctggcttcgactttcaacttacaggactgaaaattactggcaatctttgctaaactcaaaaggtatgtaatcaacctttgattacttaacaatagagggtgccaagaaactatatatctctgtgcatagttattatgaatctgatcccttatcagaaggctcgttgagtcagacatctgttttctttcgtatttagtcattccatgcatgtggacagtggcattgatatgagaaataaactacctaattgacatttttgtttggtttggtttcactggaaatttcagagaggaaatttttaggtaaaccatttgtaaattttggggtaaagttggtgaaggccttgggaagatttcatagtgaaaacaaattataacaaaggttaatatgagccattgataggcagtgctatctccattgagctcagaaaaataaagcaacatagatctcaatcaatgcctcaataagcacaaatagatcatggcagtttaatgactaacatattcattttcttttctttttggagaaatattataaatgaaagtaggaatgtcttaatacagtctgtacccatttaaaaataatctgcacagcaggatgtctcctgtccccgctttttgatactgacttggatggcacctttgactgatatattaagggaacatgaaaaattaaaagtatccaagtgaggtgaaaatgagttcaggaaatgaatattacatatgtaagcaccctattggtatcagataaagaagttcctgaactcagccaaaatatcatagcactcaaaattagagtgtgcttagtcaaagtaaaccaaatataaagttttcgatgcaaaaaatctatcaaaagaaagattcaaatttcaaatgggcacctaaaggcataaagcactttagaataactaaactgtaaaaaaaaaatactttaaatttatttagaccagacagcaagacccataaatgtcttagtacggtcagcaggttttaaggtaataatatcaccagccagtaccctgtgtaatcacaaaatatatgtagtttgatgtcatatgtatgaatatagctaattgccatcttcatcctgagtcaccatccaaacggaaaatttcattttttttaaaggcagaattaggccaaacttaataataatggttaagtgtttacttgactttagtttatgggcttgggtggtatttccaaggggtatctaaggtggccatatttaattatcattaaaaacatgcaggcctggtgcaatggctcatgcttgtaatcctaggactttgggaggccaaggcgggtggatcatgaggtcaggagttcaagaccagcctgaccaatatggtgaaaccccgtctctactgaaaatacaaaaattagccagacacagtggcaggtgcctataatctcagctactcgggaggctgaggcaagagaatcacttgaacctgggcggcaggggttgttgcggtgagctgagatcatgccactgcactacagcctgggtgacagattgagactctgtctcaaaaaaaaaacaaaaaaaaaaaaaaaaa

SEQ ID NO: 1965 - DNA, 788 bp, Homo sapiens
  misc_feature (9)..(9): n equals a,t,g, or c
  misc_feature (21)..(21): n equals a,t,g, or c
  misc_feature (23)..(23): n equals a,t,g, or c
tctttcggntgctttttccgngnaaacccaatataaagttttcgatgcaaaaaatctatcaaaagaaagattcaaatttcaaatgggcacctaaaggcataaagcactttagaataactarrctgtaaaaaaaaaatactttaaatttatttagaccagacagcaagacccataaatgtcttagtacggtcagcaggttttaaggtaataatatcaccagccagtaccctgtgtaatcacaaaatatatgtagtttgatgtcatatgtatgaatatagctaattgccatcttcatcctgagtcaccatccaaacggaaaatttcattttttttaaaggcagaattaggccaaacttaataataatggttaagtgtttacttgactttagtttatgggcttgggtggtatttccaaggggtatctaaggtggccatatttaattatcattaaaaacatgcaggcctggtgcaatggctcatgcttgtaatcctaggactttgggaggccaaggcgggtggatcatgaggtcaggagttcaagaccagcctgaccaatatggtgaaaccccgtctctactgaaaatacaaaaattagccagacacagtggcaggtgcctataatctcagctactcgggaggctgaggcaagagaatcacttgaacctgggcggcaggggttgttgcggtgagctgagatcatgccactgcactacagcctgggtgacagattgagactctgtctcaaaaaaaaaacaaaaaaaaaaaaaaaaactcgagggggggcccgg

SEQ ID NO: 1966 - DNA, 1097 bp, Homo sapiens
  misc_feature (1049)..(1049): n equals a,t,g, or c
  misc_feature (1082)..(1082): n equals a,t,g, or c
  misc_feature (1096)..(1096): n equals a,t,g, or c
ccgcttagacaatgccccggagccgccagaccgtcgcgcccctgccccatcgtagtatatgagctcgcctacacaaggacccccgctaaaagccagagctcccagtccccgaggcttgaagacggggactcccttctccaccaactctgtcctcggggggtggggccccagccgagatcacagcgcgacaggagtgggggtggccgctggagacaggtgaagaaacaagaaaactaagaaatccgagcggttggagggggagtctgtgtggatgggatggggacgccgggggaggggctgggccgctgctcccatgccctgatccggggagtcccagagagcctggcgtcgggggaaggtgcgggggctggccttcccgctctggatctggccaaagctcaaagggagcacggggtgctgggaggtaaactgaggcaacgactggggctacagctgctagaactgccacctgaggagtcattgccgctgggaccgctgcttggcgacacggccgtgatccaaggggacacggccctaatcacgcggccctggagccccgctcgtaggccagaggtcgatggagtccgcaaagccctgcaagacctggggctccgaattgtggaaataggagacgagaacgcgacgctggatggcactgacgttctcttcaccggccgggagtttttcgtaggcctctccaaatggaccaatcaccgaggagctgagatcgtggcggacacgttccgggacttcgccgtctccactgtgccagtctcgggtccctcccacctgcgcggtctctgcggcatggggggacctcgcactgttgtggcaggcagcagcgacgctgcccaaaaggctgtccgggcaatggcagtgctgacagatcacccatatgcctccctgaccctcccagatgacgcagctgctgactgtctctttcttcgtcctgggttgcctggtgtgccccctttcctcctgcaccgtggaggtggggatctgcccaacagccaggacactgaggtctcattccctctcccactccatgncttcctgtgcaagcactgcagaactcttgatgncaccctggacctgng

SEQ ID NO: 1967 - DNA, 830 bp, Homo sapiens
  misc_feature (16)..(16): n equals a,t,g, or c
aaactgtaggcaacgnactggggctacagctgctagtaactgccacctatggagtccgcaaagccctgcaagacctggggctccgaattgtggaaataggagacgagaacgcgacgctggatggcactgacgttctcttcaccggccgggagtttttcgtaggcctctccaaatggaccaatcaccgaggagctgagatcgtggcggacacgttccgggacttcgccgtctccactgtgccagtctcgggtccctcccacctgcgcggtctctgcggcatggggggacctcgcactgttgtggcaggcagcagcgacgctgcccaaaaggctgtccgggcaatggcagtgctgacagatcacccatatgcctccctgaccctcccagatgacgcagctgctgactgtctctttcttcgtcctgggttgcctggtgtgccccctttcctcctgcaccgtggaggtggggatctgcccaacagccaggaggcactgcagaagctctctgatgtcaccctggtacctgtgtcctgctcagaactggagaaggctggcgccgggctcagctccctctgcttggtgctcagcacacgcccccacagctgagggcctggccttggggtactgctggccaggggtaggatagtataggaagtagaaggggaaggagggttagatagagaatgctgaataggcagtagttgggagagagcctcaatattgggggaggggagagtgtagggaaaaggatccactgggtgaatcctccctctcagaaccaataaaatagaattgaccttttaaaaaaaaaaaaaaaaaaaaaaaaaaaaa

SEQ ID NO: 1968 - DNA, 1628 bp, Homo sapiens
tccctctctcctgcctgtgctcaaacacccacagagaactctggaaggagaagaaaaacatacctctctccttccccggcctttccccacacacactgaggttgagaagctgggaataaacagcgtccaacacttttaaatggcggtggcagctccagacaagggagamgggaaggactgagagaagaaattattagactttttagactggctgaacccagaacctttacattggttacaaaatcatgcctggaggtgaaaaattcaatagcattataccaagtgtttgggcaacggtgtagagacaatagtagagacaagctacagctttagacagtggtagagagaagctacaactttagcttgtagaaacagctgttgggtgttcagcagatgcagtctaggtgcatgcaaacccactgtgtgcagcatgccttcactctcacgacaagggagccagaccttgtgtctgcggctggctgaatattgcatggaatctgtggattcacagaggcttctyctcagctaagagggagtgtggctggatgcatttctctgtggctcattcaatttggggtatactcatactactgagtctctatgaaggagtgataagctgggtcttcaatttccaaatgtttaccaaactcctactatgtgccaagcactattcccactgctttgagagctaacggtaaacaacaacagtgaaaaaacatgtaacatcccaaccagtgcttctaaggatttaaaatatgctggtacttatgactttattcttacttctgtattatagatatgtatatggctttggggtatgtgtatatgtacacatatatgcacacatatacacacacacacatatatataatcagctgtccatagcctactcatctctgataatttatattttgtactcaaatttctcgaatacccctaccaaatcattctctcctccttaccaatattataatgtccctgacaataacataacaaacccagctctaacacctacagatttctttgagaacaaacaacttctacatgcaatttcttttctatactcaccaactggttttcttcaacctcctgcccaccctgtccagctcaggacatcaacaaccctttatggaaaccaccgaggtcagactggatgcagtcagttggactgattcatcatgactagttcaattaagagctgatcaccttcaaacagctctgactttggaagcaattgatttgactgcctctttggtcacatggccagatttacccataattttttgcaaacttggatgcatctttagatacagagcaatgctttggcatctgggggagggggttgttcctggtgctgtcacttgtacccactctcctgtttcctctccaactatgagtcacattttccctcaatatctcctatcttactttttgagtgatcagccctgactttcaagtctaaatttctcctccacgccaaaaacaaaacaaaaacagaaaaacaaaaaaagctttttgctgtatcacaccacctaaagtttggctagtgaacatgagcagacctcttctgaatcccacacatcagccatgctcttgcagccatgtagaggagctggaggtgggtgggc

SEQ ID NO: 1969 - DNA, 2484 bp, Homo sapiens
  misc_feature (2476)..(2476): n equals a,t,g, or c
aattcggcacgagcttaatctcgctgcgtgctgatctctggcctttccctttagtctgtccgagtctccccttttgggacatcattcttcttctgatgctgccaggagacgctctgtctcttccttcccagtcccccaggacaatgtggatgctcatcctggttctggtaaagaagtgagggtaccagctactgccttgtgtgtcttcgatgcacatgatggggaagtcaacgctgtgcagttcagtccaggttcccggttactggccactggaggcatggaccgcaggkttaagctttgggaagtatttggagaaaaatgtgagttcaagggttccctatctggcagtaatgcaggaattacaagcattgaatttgatagtgctggatcttacctcttagcagcttcaaatgattttgcaagccgaatctggactgtggatgattatcgattacggcacacactcacgggacacagtgggaaagtgctgtctgctaagttcctgctggacaatgcgcggattgtctcaggaagtcacgaccggactctcaaactctgggatctacgcagcaaagtctgcataaagacagtgtttgcaggatccagttgcaatgatattgtctgcacagagcaatgtgtaatgagtggacattttgacaagaaaattcgtttctgggacattcgatcagagagcatagttcgagagatggagctgttgggaaagattactgccctggacttaaacccagaaaggactgagctcctgagctgctcccgtgatgacttgctaaaagttattgatctccgaacaaatgctatcaagcagacattcagtgcacctgggttcaagtgcggctctgactggaccagagttgtcttcagccctgatggcagttacgtggcggcaggctctgctgagggctctctgtatatctggagtgtgctcacagggaaagtggaaaaggttctttcaaagcagcacagctcatccatcaatgcggtggcgtggtcgccctctggctcgcacgttgtcagtgtggacaaaggatgcaaagctgtgctgtgggcacagtactgacggggctctcagggctgggaggaccccagtgccctcctcagaagaagcacatgggctcctgcagccctgtcctggcaggtgatgtgctgggtatagcatggacctcccagagaagctcaagctatgtggcactgtagctttgccgtgaatgggatttctgaagatttgactgaggtctctcttggcctggaagaataacactgaaaaaacctgacgctgcggtcacttagcagaggctcaggttcttgccttgggaaacactactagctctgaccttccatacctcacttgggggagcacagggccccgctgggcctcctcaccaacggcagtgccaaaatcagcccccacatcaaggtggtgttctctgtgctttctctcgtccttccaaagtcggttctggcctaacgcatgtcccaacaccttgggttcatttgcccggtgaactcactttaagcattggattaacggaaactcccgaactacagacccctccctggtgggttgcatgaatgtgtctcattactgctgaaatgtcctcacatctcttycactgttcttcagagctttctggctctctttcccccacaaaattcgacayatttaaaaatctccgtgtggctttaaaaaatggttttttgtttttttgtttttttgaggtgggagaggatgtgtgaaaatcttttccagggaaatgggttcgctgcagaggtaaggatgtgttcctgtatcgatctgcagacacccagaaggtgggtgcacactgcatgcttgggggtgccaagggattcgagacctccaacatacttgtctgaaggtggtgattctggccatggcccctctgccaagcctgtgtgcgatgcccttggtgctttagtgcaagaagcctaggctcagaagcacagcagcgccatctttccgtttcaggggttgtgatgaaggccaaggaaaaacatttatctttactattttacctacgtataaagttttagttcattgggtgtgcgaaacaccctttttatcacttttaaatttgcactttattttttttcttccatgcttgttctctggacatttggggatgtgagtgttagagctggtgagagaggagtcaggcggccttcccaccgatggtcctggcctccacctgccctctcttccctgcctgatcaccgctttccaatttgcccttcagagaacttaagtcaaggagagttgaaattcacaggccagggcacatcttttatttatttcattatgttggccaacagaacttgattgtaaataataataaagaaatctgttatatacttttcaaaaaaaaaaaaaaaagggcggccgctctagaggatccaagcttacgtacgcgtgcatgcgacgtcatagctcttctatagnggcaccta

SEQ ID NO: 1970 - DNA, 1626 bp, Homo sapiens
  misc_feature (1604)..(1604): n equals a,t,g, or c
  misc_feature (1607)..(1607): n equals a,t,g, or c
  misc_feature (1615)..(1616): n equals a,t,g, or c
ggcacgagcggaagtcccgtctcacggttgccctggcagcgcgcgaggctggtgagtcggcagccctgtggcagccggcgggctggtttccatggttgcacgattaggaaccaccagctgctgcatcccatggccaggggtggcgtccaggtggcagagcagctaggaacgcaaggcctgaacctggggccagacaccctgctctcccggccatggtcaacgaccctccagtacctgccttactgtgggcccaggaggtgggccaagtcttggcaggccgtgcccgcaggctgctgctgcagtttggggtgctcttctgcaccatcctccttttgctctgggtgtctgtcttcctctatggctccttctactattcctatatgccgacagtcagccacctcagccctgtgcatttctactacaggaccgactgtgattcctccaccacctcactctgctccttccctgttgccaatgtctcgctgactaagggtggacgtgatcgggtgctgatgtatggacagccgtatcgtgttaccttagagcttgagctgccagagtcccctgtgaatcaagatttgggcatgttcttggtcaccatttcctgctacaccagaggtggccgaatcatctccacttcttcgcgttcggtgatgctgcattaccgctcagacctgctccagatgctggacacactggtcttctctagcctcctgctatttggctttgcagagcagaagcagctgctggaggtggaactctacgcagactatagagagaactcgtacgtgccgaccactggagcgatcattgagatccacagcaagcgcatccagctgtatggagcctacctccgcatccacgcgcacttcactgggctcagatacctgctatacaacttcccgatgacctgcgccttcataggtgttgccagcaacttcaccttcctcagcgtcatcgtgctcttcagctacatgcagtgggtgtgggggggcatctggccccgacaccgcttctctttgcaggttaacatccgaaaaagagacaattcccggaaggaagtccaacgaaggatctctgctcatcagccagggcctgaaggccaggaggagtcaactccgcaatcagatgttacagaggatggtgagagccctgargatccctcagggacagagggtcagctgtccgaggaggagaaaccagatcagcagcccctgagcggagaagaggagctagagcctgaggccagtgatggttcaggctcctgggaagatgcagctttgctgacggaggccaacctgcctgctcctgctcctgcttctgcttctgcccctgtcctagagactctgggcagctctgaacctgctgggggtgctctccgacagcgccccacctgctctagttcctgaagaaaaggggcagactcctcacattccagcactttcccacctgactcctctcccctcgtttttccttcaataaactattttgtgtcagcttcaaaaaaaaaaaaaaaaaaaaaaaaaaaaaaaaaaaaaaaaawaaaaaaaaaaaaaaaaaaaaaaaaaaaaaaaaaaaaaaaaaaaaagggggggccgttttanagnacccctcnnggggcccaag

SEQ ID NO: 1971 - DNA, 582 bp, Homo sapiens
  misc_feature (27)..(27): n equals a,t,g, or c
  misc_feature (125)..(125): n equals a,t,g, or c
  misc_feature (495)..(495): n equals a,t,g, or c
  misc_feature (557)..(557): n equals a,t,g, or c
  misc_feature (565)..(565): n equals a,t,g, or c
tgatcgggtgctgatgtatggacagcncgtatcgtgttaccttagagcttgagctgccagagtcccctgtgaatcaagatttgggcatgttcttggtcaccatttcctgctacaccagaggtggncgaatcatctccacttcttcgcgttcggtgatgctgcattaccgctcagacctgctccagatgctggacacactggtcttctctagcctcctgctatttggctttgcagagcakaagcagctgctggaggtggaactctacrcagactatagagagaactygtacgtgccgaccactggagcgatcattgagatccacagcaagcgcatccagctgtatgggagcctacctccgcatccacgcgcacttcactggggctcagatacctgctattacaacttcccgatgacctgcgccttcataggtgtttgccagcaactttcaccttcctcagcgtcatcgtgctctttcagttacatgcagtggggtntggggggggaattttgggcccgaaaaccgttttttttttgaaggttaaacatccgaaaaagngacatttnccgggaagggaagccca

SEQ ID NO: 1972 - DNA, 1585 bp, Homo sapiens
  misc_feature (6)..(6): n equals a,t,g, or c
  misc_feature (14)..(14): n equals a,t,g, or c
  misc_feature (38)..(39): n equals a,t,g, or c
  misc_feature (62)..(63): n equals a,t,g, or c
  misc_feature (93)..(93): n equals a,t,g, or c
aataanctcgaacnccttttcaaaagggaacaaaggcnngccctccaccgaggtggcggttnntctagcaactagtggatcccccggggctgnaaataattcggcacgagccaccagctgctgcatcccatggccaggggtggcgtccaggtggcagagcagctaggaacgcaaggcctgaacctggggccagacaccctgctctcccggccatggtcaacgaccctccagtacctgccttactgtgggcccaggaggtgggccaagtcttggcaggccgtgcccgcaggctgctgctgcagtttggggtgctcttctgcaccatcctccttttgctctgggtgtctgtgtaccggtccggaattcccgggtcgacccacgcgtccgacagtcagccacctcagccctgtgcatttctatttaggtgacactatagaaggtacgcctgcaggtaccggtccggaattcccgggtcgacccacgcgtccggtggacgtgatcgggtgctgatgtatggacagccgtatcgtgttaccttagagcttgagctgccagagtcccctgtgaatcaagatttgggcatgttcttggtcaccatttcctgctacaccagaggtggccgaatcatctccacttcttcgcgttcggtgatgctgcattaccgctcagacctgctccagatgctggacacactggtcttctctagcctcctgctatttggctttgcagagcagaagcagctgctggaggtggaactctacgcagactatagagagaactcgtacgtgccgaccactggagcgatcattgagatccacagcaagcgcatccagctgtatggagcctacctccgcatccacgcgcacttcactgggctcagatacctgctatacaacttcccgatgacctgcgccttcataggtgttgccagcaacttcaccttcctcagcgtcatcgtgctcttcagctacatgcagtgggtgtgggggggcatctggccccgacaccgcttctctttgcaggttaacatccgaaaaagagacaattcccggaaggaagtccaacgaaggatctctgctcatcagccagggcctgaaggccaggaggagtcaactccgcaatcagatgttacagaggatggtgagagccctgaggatccctcagggacagagggtcagctgtccgaggaggagaaaccagatcagcagcccctgagcggagaagaggagctagagcctgaggccagtgatggttcaggctcctgggaagatgcagctttgctcacggaggccaacctgcctgctcctgctcctgcttctgcttctgcccctgtcctagagactctgggcagctctgaacctgctgggggtgctctccgacagcgccccacctgctctagttcctgaagaaaaggggcagactcctcacattccagcactttcccacctgactcctctcccctcgtttttccttcaataaactattttgtgtcagcttcaaaaaaaaaaaaaaaaaaaaaaaaaaaaaaaaaaaaaaaaaaaaaaaaaaaaaaaaaaaaaaaaaaaaaaaaaaaaaaaaaaaaaaa

SEQ ID NO: 1973 - DNA, 1179 bp, Homo sapiens
  misc_feature (1171)..(1171): n equals a,t,g, or c
  misc_feature (1179)..(1179): n equals a,t,g, or c
cgctctggccggccccggcgattggtcaccgcccgctaggrgacagccctggcctcctctgattggcaagcgctggccacctccccacaccccttgcgaacgtcccctagtggagaaaaggagtagctattagccaattcggcagggcccgctttttagaagcttgatttcctttgaagatgaaagactagcggamgtctgcctctttccccagtgggcgagggaactcggggcgattggctgggaactgtatccacccaaatgtcaccgatttcttcctatgcaggaaatgagcagacccatcaataagaaatttctcagcctggccgaaaatggttggccccacgaagccacgacaactggaggcaaagagggttgctcaacgccccgcctcattggaaaaccaaatcagatctgggacctatatagcgtggcggaggcggggcgatgattgtcgcgctcgcacccactgcagctgcgcacagtcgcatttctttccccgcccctgagaccctgcagcaccatctgtcatggcggctgggctgtttggtttgagcgctcgccgtcttttggcggcagcggcgacgcgagggctcccggccgcccgcgtccgctgggaatctagcttctccaggactgtggtcgccccgtccgctgtggcgggaaagcggcccccagaaccgaccacaccgtggcaagaggacccagaacccgaggacgaaaacttgtatgagaagaacccagactcccatggttatgacaaggaccccgttttggacgtctggaacatgcgacttgtcttcttctttggcgtctccatcatcctggtccttggcagcacctttgtggcctatctgcctgactacaggatgaaagagtggtcccgccgcgaagctgagaggcttgtgaaataccgagaggccaatggccttcccatcatggaatccaactgcttcgaccccagcaagatccagctgccagaggatgagtgaccagttgctaagtggggctcaagaagcaccgccttccccaccccctgcctgccattctgacctcttctcagagcacctaattaaaggggctgaaagtctgaaaaaaaaaaaaaaaaaaaaaaaaaaaaaaaaaaaaaaaaaaamataaaaaaaaaaaaaaaaaaaaaaaaaaaaaaaangggggggn

SEQ ID NO: 1974 - DNA, 2478 bp, Homo sapiens
  misc_feature (2477)..(2477): n equals a,t,g, or c
gctaggacccggcgggccgcgggtgcggcgaggcctgggcggcctgaggagcgcggaccccggcgctcggctcccggcgccatgtgagggggctcgggggccgcggggggccgggcgctccccgccggagatgaggaaactgaggctcagagaggtcacatggcttgctcgaggccccccagccagtgtgaacccacatccctgcccccagggccacctgcaggacgccgacacctacccctcagcagacgccggagagaaatgagtagcaacaaagagcagcggtcagcagtgttcgtgatcctctttgccctcatcaccatcctcatcctctacagctccaacagtgccaatgaggtcttccattacggctccctgcggggccgtagccgccgacctgtcaacctcaagaagtggagcatcactgacggctatgtccccattctcggcaacaagacactgccctctcggtgccaccagtgtgtgattgtcagcagctccagccacctgctgggcaccaagctgggccctgagatcgagcgggctgagtgtacaatccgcatgaatgatgcacccaccactggctactcagctgatgtgggcaacaagaccacctaccgcgtcgtggcccattccagtgtgttccgcgtgctgaggaggccccaggagtttgtcaaccggacccctgaaaccgtgttcatcttctgggggcccccgagcaagatgcagaagccccagggcagcctcgtgcgtgtgatccagcgagcgggcctggtgttccccaacatggaagcatatgccgtctctcccggccgcatgcggcaatttgacgacctcttccggggtgagacgggcaaggacagggagaagtctcattcgtggttgagcacaggctggtttaccatggtgatcgcggtggagttgtgtgaccacgtgcatgtctatggcatggtcccccccaactactgcagccagcggccccgcctccagcgcatgccctaccactactacgagcccaaggggccggacgaatgtgtcacctacatccagaatgagcacagtcgcaagggcaaccaccaccgcttcatcaccgagaaaagggtcttctcatcgtgggcccagctgtatggcatcaccttctcccacccctcctggacctaggccacccagcctgtgggacctcaggagggtcagaggagaagcagcctccgcccagccgctaggccagggaccatcttctggccaatcaaggcttgctggagtgtctcccagccaatcagggccttgaggaggatgtatcctccagccaatcagggcctggggaatctgttggcgaatcagggatttgggagtctatgtggttaatcaggggtgtctttcttgtgcagtcagggtctgcgcacagtcaatcagggtagagggggtatttctgagtcaatctgaggctaaggacatgtcctttcccatgaggccttggttcagagccccaggaatggaccccccaatcactccccactctgctgggataatggggtcctgtcccaaggagctgggaacttggtgttgccccctcaatttccagcaccagaaagagagattgtgtgggggtagaagctgtctggaggcccggccagagaatttgtggggttgtggaggttgtgggggcggtggggaggtcccagaggtgggaggctggcatccaggtcttggctctgccctgagaccttggacaaacccttccccctctctgggcacccttctgcccacaccagtttccagtgcggagtctgagaccctttccacctcccctacaagtgccctcgggtctgtcctccccgtctggaccctcccagccactatcccttgctggaaggctcagctctttggggggtctggggtgacctccccacctcctggaaaactttagggtatttttgcgcaaactccttcagggttgggggactctgaaggaaacgggacaaaaccttaagctgttttcttagcccctcagccagctgccattagcttggctcttaaagggccaggcctccttttctgccctctagcagggaggttttccaactgttggaggcgcctttggggctgcccctttgtctggagtcactgggggcttccgagggtctccctcgaccctctgtcgtcctgggatggctgtcgggagctgtatcacctgggttctgtcccctggctctgtatcaggcactttattaaagctgggcctcagtggggtgtgtttgtctcctgctcttctggagcctggaaggaaagggcttcaggaggaggctgtgaggctggagggaccagatggaggaggccagcagctagccattgcacactggggtgatgggtgggggcggtgactgccccagacttggttttgtaatgatttgtacaggaataaacacacctacgctccgaaaaaaaaaaaaaaaaaaaaaaaaaaaaaaaaaaacccnt

SEQ ID NO: 1975 - DNA, 481 bp, Homo sapiens
ttcgacccacgcgtccggcggcctgaggagcgcggaccccggcgctcggctcccggcgccatgtgagggggctcgggggccgcggggggccgggcgctccccgccggaggtktgaacccacatccctgcccccagggccacctgcaggacgccgacacctacccctcagcagacgccggagagaaatgagtagcaacaaagagcagcggtcagcagtgttcgtgatcctctttgccctcatcaccatcctcatcctctacagctccaacagtgccaatgaggtcttccattacggctccctgcggggccgtagccgccgacctgtcaacctcaagaagtggagcatcactgacggctatgtccccattcttcggcaacaagacactgccctctcggtgccamcagtgtgtgattgtcagcagytccagccamctgctgggcaccaagctkgggccctgagatygagcgggtgartgtacaa

SEQ ID NO: 1976 - DNA, 2413 bp, Homo sapiens
ggcacgagcggctcccggcgccatgtgagggggctcgggggccgcggggggccgggcgctccccgccggagatgaggaaactgaggctcagagaggtcacatggcttgctcgaggccccccagccagtgtgaacccacatccctgcccccagggccacctgcaggacgccgacacctacccctcagcagacgccggagagaaatgagtagcaacaaagagcagcggtcagcagtgttcgtgatcctctttgccctcatcaccatcctcatcctctacagctccaacagtgccaatgaggtcttccattacggctccctgcggggccgtagccgccgacctgtcaacctcaagaagtggagcatcactgacggctatgtccccattctcggcaacaagacactgccctctcggtgccaccagtgtgtgattgtcagcagctccagccacctgctgggcaccaagctgggccctgagatcgagcgggctgagtgtacaatccgcatgaatgatgcaccaccactggctactcagctgatgtgggcaacaagaccacctaccgcgtcgtggcccattccagtgtgttccgcgtgctgaggaggccccaggagtttgtcaaccggacccctgaaaccgtgttcatcttctgggggcccccgagcaagatgcagaagccccagggcagcctcgtgcgtgtgatccagcgagcgggcctggtgttccccaacatggaagcatatgccgtctctcccggccgcatgcggcaatttgacgacctcttccggggtgagacgggcaaggacagggagaagtctcattcgtggttgagcacaggctggtttaccatggtgatcgcggtggagttgtgtgaccacgtgcatgtctatggcatggtcccccccaactactgcagccagcggccccgcctccagcgcatgccctaccactactacgagcccaaggggccggacgaatgtgtcacctacatccagaatgagcacagtcgcaagggcaaccaccaccgcttcatcaccgagaaaagggtcttctcatcgtgggcccagctgtatggcatcaccttctcccacccctcctggacctaggccacccagcctgtgggacctcaggagggtcagaggagaagcagcctccgcccagccgctaggccagggaccatcttctggccaatcaaggcttgctggagtgtctcccagccaatcagggccttgaggaggatgtatcctccagccaatcagggcctggggaatctgttggcgaatcagggatttgggagtctatgtggttaatcaggggtgtctttcttgtgcagtcagggtctgcgcacagtcaatcagggtagagggggtatttctgagtcaatctgaggctaaggacatgtcctttcccatgaggccttggttcagagccccaggaatggaccccccaatcactccccactctgctgggataatggggtcctgtcccaaggagctgggaacttggtgttgccccctcaatttccagcaccagaaagagagattgtgtgggggtagaagctgtctggaggcccggccagagaatttgtggggttgtggaggttgtgggggcggtggggaggtcccagaggtgggaggctggcatccaggtcttggctctgccctgacgccttgcccaaacccttccccctctctgggcacccttctgcccccaccactttccagtgcggagtctgagaccctttccacctcccctacaagtgccctcgggtctgtcctccccgtctggaccctcccagccactatcccttgctggaaggctcagctctttggggggtctggggtgacctccccacctcctggaaaactttagggtacttttgcgcaaactccttcagggttgggggactctgaaggaaacgggacaaaaccttaagctgttttcttagcccctcagccagctgccattagcttggctcttaaagggccaggcctccttttctgccctctagcagggaggttttccaactgttggaggcgcctttggggctgcccctttgtctggagtcactgggggcttccgagggtctccctcgaccctctgtcgtcctgggatggctgtcgggagctgtatcacctgggttctgtcccctggctctgtatcaggcactttattaaagctgggcctcagtggggtgtgtttgtctcctgctcttctggagcctggaaggaaagggcttcaggaggaggctgtgaggctggagggaccagatggaggaggccagcagctagccattgcacactggggtgatgggtgggggcggtgactgccccagacttggttttgtaatgatttgtacaggaataaacacacctacgctccgaaaaaaaaaaaaaaaaaaaaaaaaaaaaaaaaaaa

SEQ ID NO: 1977 - DNA, 2518 bp, Homo sapiens
aggcaagctaaaattaaccctcactaaagggaacaaaagctggagctccaccgcggtggcggccgctctagaactagtggatcccccgggctgcaggaattcggcacgagcggctcccggcgccatgtgagggggctcgggggccgcggggggccgggcgctccccgccggagatgaggaaactgaggctcagagaggtcacatggcttgctcgaggccccccagccagtgtgaacccacatccctgcccccagggccacctgcaggacgccgacacctacccctcagcagacgccggagagaaatgagtagcaacaaagagcagcggtcagcagtgttcgtgatcctctttgccctcatcaccatcctcatcctctacagctccaacagtgccaatgaggtcttccattacggctccctgcggggccgtagccgccgacctgtcaacctcaagaagtggagcatcactgacggctatgtccccattctcggcaacaagacactgccctctcggtgccaccagtgtgtgattgtcagcagctccagccacctgctgggcaccaagctgggccctgagatcgagcgggctgagtgtacaatccgcatgaatgatgcacccaccactggctactcagctgatgtgggcaacaagaccacctaccgcgtcgtggcccattccagtgtgttccgcgtgctgaggaggccccaggagtttgtcaaccggacccctgaaaccgtgttcatcttctgggggcccccgagcaagatgcagaagccccagggcagcctcgtgcgtgtgatccagcgagcgggcctggtgttccccaacatggaagcatatgccgtctctcccggccgcatgcggcaatttgacgacctcttccggggtgagacgggcaaggacagggagaagtctcattcgtggttgagcacaggctggtttaccatggtgatcgcggtggagttgtgtgaccacgtgcatgtctatggcatggtcccccccaactactgcagccagcggccccgcctccagcgcatgccctaccactactacgagcccaaggggccggacgaatgtgtcacctacatccagaatgagcacagtcgcaagggcaaccaccaccgcttcatcaccgagaaaagggtcttctcatcgtgggcccagctgtatggcatcaccttctcccaccccttcctggacctaggccacccagcctgtgggacctcaggagggtcagaggagaagcagcctccgcccagccgctaggccagggaccatcttctggccaatcaaggcttgctggagtgtctcccagccaatcagggccttgaggaggatgtatcctccagccaatcagggcctggggaatctgttggcgaatcagggatttgggagtctatgtggttaatcaggggtgtctttcttgtgcagtcagggtctgcgcacagtcaatcagggtagagggggtatttctgagtcaatctgaggctaaggacatgtcctttcccatgaggccttggttcagagccccaggaatggaccccccaatcactccccactctgctgggataatggggtcctgtcccaaggagctgggaacttggtgttgccccctcaatttccagcaccagaaagagagattgtgtgggggtagaagctgtctggaggcccggccagagaatttgtggggttgtggaggttgtgggggcggtggggaggtcccagaggtgggaggctggcatccaggtcttggctctgccgtgagaccttggacaaacccttccccctctctgggcacccttctgcccacgccagtttccagtgcggagtctgagaccctttccacctcccctaccagtgccctcgggtctgtccctccccgtctgggaccctcccagccactatccctcgctggaaggctcagctctttggggggtctggggtgacctccccacatcctggaaaactttagggtatttttgcgcaaactccttcagggttgggggactctgaaggaaacgggacaaaaccttaagctgttttcttagcccctcagccagctgccattagcttggctcttaaagggccaggcctcccttttctgccctctaggcagggaggttttccaactgttggaggcgcctttggggctgcccctttgtctggagtcactgggggcttccgagggtctccctcgaccctctgtcgtcctgggatggctgtcgggagctgtatcacctgggttctgtcccctgggctctgtatcaggcactttattaaagctgggcctcagtggggtgtgtttgtctcctgctcttctggagcctggaaggaaagggcttcaggaggaggctgtgaggctggagggaccagatggaggaggccagcagctagccattgcacactggggtgatgggtgggggcggtgactgccccagacttggttttgtaatgatttgtacaggaataaacacacctacgctccggaaaaaaaaaaaaaaaaaaaaaaaaaaaaaa

SEQ ID NO: 1978 - DNA, 1439 bp, Homo sapiens; identical to SEQ ID NO: 876
  misc_feature (1425)..(1425): n equals a,t,g, or c

SEQ ID NO: 1979 - DNA, 677 bp, Homo sapiens
  misc_feature (41)..(41): n equals a,t,g, or c
ggcagaggtgtctccagcctggctctatcttcctccttgtnatcgtcccatccccacatcccgtgcaccccccaggaccctggtctcatcagtccctctcctggagctgggggtccacacatctcccagccaagtccaagagggcagggccagttcctcccatcttcaggcccagccaggcagggggcagtcggctcctcaactgggtgacaagggtsaggatgagaagtggtcgtgggatttattcagccttggtcagagcagaacacagagattttccacgtgttggtttttactctagttccccttctcatcccccttcctcagggtgtcccctaattgcaaggccccattctgtccccagccccagggctccttgtccagtgtcccagcccccagccagccctgcgccccactgtcytctgggagggaggtgctgcatgggcccctccccgcctgctcaggagactgcttcttttccaggtggtggaggaggtcccgaacgtgtgcacagagtccttttccggcggcgttcatgtccttcacgagttcctggggcggaggacaatgcccgcaacgagaccctgagtaacagatacttgcagcccacccaggtctctgagcaggaaatccaaggtcaggagctggcagarataacaggtgtgactgtagaattg

SEQ ID NO: 1980 - DNA, 808 bp, Homo sapiens
ccacgcgtccgcccacgcgtccgggcaacatggggtccagcagcttcttggtcctcatggtgtctctcgttcttgtgaccctggtggctgtggaaggagttaaagagggtatagagaaagcaggggtttgcccagctgacaacgtacgctgcttcaagtccgatcctccccagtgtcacacagaccaggactgtctgggggaaaggaagtgttgttacctgcactgtggcttcaagtgtgtgattcctgtgaaggaactggaagaaggaggaaacaaggatgaagatgtgtcaaggccataccctgagccaggatgggaggccaagtgtccaggctcctcctctaccaggtgtcctcagaaatgatgctgggtcctttctacctctgggggtcactctcacttggcacctgcccctgagggtcctgagacttggaatatggaagaagcaatacccaaccccaccaaagaaaacctgagcttgaagtccttttccccaaaaagagggaagagtcacaaaaagtccagaccccagggacggtactttccctctctacctggtgctcctccctaatgctcatgaatggacccctcatgaatgaaaccagtgcccttataagagaccccaaagagctgccttgcccttctgcaatgtgtgatcacagctagaaggcactgtcagagaagagaaactggtcctcaccagatgctgaatctgctggtgccttgatcttggacttcccagcctctagaactgtaagaaataaatatttgctgtttataatccaaaaaaaaaaaaaaaaaaaaaaa

SEQ ID NO: 1981 - DNA, 693 bp, Homo sapiens
  misc_feature (671)..(671): n equals a,t,g, or c
  misc_feature (677)..(677): n equals a,t,g, or c
  misc_feature (680)..(680): n equals a,t,g, or c
ggccgccctttttttttttttttttttttttttttttttttttttttttttttttttttttttttttaaagttaaagattcttttattaataaattctccctcccctccaaactctccccaaaataaatatctcctccccgctttggggagttgggggggtctgtatcttagggccagccctcctagtgggccagccccctagtgttaaaaataggtccctaaccccccagggtgacccccgtggtggaatttcaggacatctgagtgagtggggcctagtgtcaagtctgccccccaagtcagcctggcccccagggcctctaggaaggagggcacccccctcccctgtgcaaatgctgcagttccttagtcagtgtcagctgttttgtgtgagccagcgtgaggctccctttctgttctggagccagaggcagggcaaccagacaccttggaaggttcccctgaaccctgggcccaggcctcagaggtgattcaccgccccccaccccccttgtggttggaggagcttggctcccgccgcgtctgggaggcagagactggctctagaatggatgaatgaatgatgagtgggcgagccccggctggcagggggcacattgtcactggatctacaggacatgctgggsaaccatgggccggtgtctggtgnatgctngtngtccacttatctc

SEQ ID NO: 1982 - DNA, 1053 bp, Homo sapiens
gaattcsgcacgagcagacagcggcgggcgcaggacgtgcactatggctcggggctcgctgcgccggttgctgcggctcctcgtgctggggctctggctggcgttgctgcgctccgtggccggggagcaagcgccaggcaccgccccctgctcccgcggcagctcctggagcgcggacctggacaagtgcatggactgcgcgtcttgcagggcgcgaccgcacagcgacttctgcctgggctgcgctgcagcacctcctgcccccttccggctgctttggcccatccttgggggcgctctgagcctgaccttcgtgctggggctgctttctggctttttggtctggagacgatgccgcaggagagagaagttcaccacccccatagaggagaccggcggagagggctgcccagctgtggcgctgatccagtgacaatgtgccccctgccagccggggctcgcccactcatcattcattcatccattctagagccagtctctgcctcccagacgcggcgggagccaagctcctccaaccacaaggggggtggggggcggtgaatcacctcygaggcctgggcccagggttcaggggaaccttccaaggtgtctggttgccctgcctctggctccagaacagaaagggagcctcacgctggctcacacaaaacagctgacactgactaaggaactgcagcatttgcacaggggaggggggtgccctccttcctagaggccctgggggccaggctgacttggggggcagacttgacactaggccccactcactcagatgtcctgaaattccaccacgggggtcaccctggggggttagggacctatttttaacactagggggctggcccactaggagggctggccctaagatacagacccccccaactccccaagcggggaggagatatttattttggggagagtttggaggggagggagaatttattaataaaagaatctttaactttaaaaaaaaaaaaaaaaaaaaaaaaaaaaaaaaaaaaaaaaaaaaaaaaaaaaaaaaaaaaactcgga

SEQ ID NO: 1983 - DNA, 732 bp, Homo sapiens
  misc_feature (632)..(632): n equals a,t,g, or c
  misc_feature (654)..(654): n equals a,t,g, or c
  misc_feature (670)..(670): n equals a,t,g, or c
  misc_feature (692)..(692): n equals a,t,g, or c
  misc_feature (712)..(712): n equals a,t,g, or c
gcgcaggacgtgcactatggctcggggctcgctgcgccggttgctgcggctcctcgtgctggggctctggctggcgttgctgcgctccgtggccggggagcaagcgccaggcgctgcagcacctcctgcccccttccggctgctttggcccatccttgggggcgctctgagcctgaccttcgtgctggggctgctttctggctttttggtctggagacgatgccgcaggagagagaagttcaccacccccatagaggagaccggcggagagggctgcccagctgtggcgctgatccagtgacaatgtgccccctgccagccggggctcgcccactcatsattcattcatccattctagagccagtctctgcctcccagacgcggcgggaccaagctcctccaaccacaaggggggtggggggcggtgaatcacctctgaggcctgggcccagggttcaggggaacttccaaggtgtctggttgccctgcctctggctccagaacagaaagggagcctcacgctggctcacacaaaacagctgacactgactaaggaactgcagcatttgcacaggggaggggggtgcctccttcctagaggccctgggggccaagctgacttggggggcagnttgacactaggccccactcaantcagatgtcctgaaantccaccacgggggtcaaccttncggggttaaggacctatttnttaacactaaggggggcttg

SEQ ID NO: 1984 - DNA, 890 bp, Homo sapiens
ccacgcgtccgcgcaggacgtgcactatggctcggggctcgctgcgccggttgctgcggctcctcgtgctggggctctggctggcgttgctgcgctccgtggccggggagcaagcgccaggcgctgcagcacctcctgcccccttccggctgctttggcccatccttgggggcgctctgagcctgaccttcgtgctggggctgctttctggctttttggtctggagacgatgccgcaggagagagaagttcaccacccccatagaggagaccggcggagagggctgcccagctgtggcgctgatccagtgacaatgtgccccctgccagccggggctcgcccactcatcattcattcatccattctagagccagtctctgcctcccagacgcggcgggagccaagctcctccaaccacaaggggggtggggggcggtgaatcacctctgaggcctgggcccagggttcaggggaaccttccaaggtgtctggttgccctgcctctggctccagaacagaaagggagcctcacgctggctcacacaaaacagctgacactgactaaggaactgcagcatttgcacaggggaggggggtgccctccttcctagaggccctgggggccaggctgacttggggggcagacttgacactaggccccactcactcagatgtcctgaaattccaccacgggggtcaccctgggggttagggacctatttttaacactagggggttggcccactaggagggctggccctaagatacagacccccccaactccccaaagcggggaggagatatttattttggggagagtttggaggggagggagaatttattaataaaagaatctttaactttaaaaaaaaaaaaaaaaaaaaaaaaaa

SEQ ID NO: 1985 - DNA, 135 bp, Homo sapiens
atgggtgattggagattattagattctaggttaacttctaccactttaccctaatacataaaactttttcctaaataaatgatggaaggaataaaaaaaaaaaaaaaaaaaaaaaaaaaaaaaaaaagggcggcc

SEQ ID NO: 1986 - DNA, 1943 bp, Homo sapiens; identical to SEQ ID NO: 1770

SEQ ID NO: 1987 - DNA, 76 bp, Homo sapiens; identical to SEQ ID NO: 1615

SEQ ID NO: 1988 - DNA, 1926 bp, Homo sapiens
ggcacgagggggcttcgcgtctgtgcttcctgtggctgacgtcatctggaggagatttgctttctttttctccaaaaggggaggaaattgaaactgagtggcccacgatgggaagaggggaaagcccaggggtacaggaggcctctgggtgaaggcagaggctaacatggggttcggagcgaccttggccgttggcctgaccatctttgtgctgtctgtcgtcactatcatcatctgcttcacctgctcctgctgctgcctttacaagacgtgccgccgaccacgtccggttgtcaccaccaccacatccaccactgtggtgcatgccccttatcctcagcctccaagtgtgccgcccagctaccctggaccaagctaccagggctaccacaccatgccgcctcagccagggatgccagcagcaccctacccaatgcagtacccaccaccttacccagcccagcccatgggcccaccggcctaccacgagaccctggctggaggagcagccgcgccctaccccgccagccagcctccttacaacccggcctacatggatgccccgaaggcggccctctgagcattccctggcctctctggctgccacttggttatgttgtgtgtgtgcgtgagtggtgtgcaggcgcggttccttacgccccatgtgtgctgtgtgtgtccaggcacggttccttacgccccatgtgtgctgtgtgtgtcctgcctgtatatgtggcttcctctgatgctgacaaggtggggaacaatccttgccagagtgggctgggaccagactttgttctcttcctcacctgaaattatgcttcctaaaatctcaagccaaactcaaagaatggggtggtggggggcaccctgtgaggtggcccctgagaggtgggggcctctccagggcacatctggagttcttctccagcttaccctagggtgaccaagtagggcctgtcacaccagggtggcgcagctttctgtgtgatgcagatgtgtcctggtttcggcagcgtagccagctgctgcttgaggccatggctcgtccccggagttgggggtacccgttgcagagccagggacatgatgcaggcgaagcttgggatctggccaagttggactttgatcctttgggcagatgtcccattgctccctggagcctgtcatgcctgttggggatcaggcagcctcctgatgccagaacacctcaggcagagccctactcagctgtacctgtctgcctggactgtcccctgtccccgcatctcccctgggaccagctggagggccacatgcacacacagcctagctgcccccagggagctctgctgcccttgctggccctgcccttcccacaggtgagcagggctcctgtccaccagcacactcagttctcttccctgcagtgttttcattttattttagccaaacattttgcctgttttctgtttcaaacatgatagttgatatgagactgaaacccctgggttgtggagggaaattggctcagagatggacaacctggcaactgtgagtccctgcttcccgacaccagcctcatggaatatgcaacaactcctgtaccccagtccacggtgttctggcagcagggacacctgggccaatgggccatctggaccaaaggtggggtgtggggccctggatggcagctctggcccagacatgaatacctcgtgttcctcctccctctattactgtttcaccagagctgtcttagctcaaatctgttgtgtttctgagtctagggtctgtacacttgtttataataaatgcaatcgtttggaaaaaaaaaaaaaaaaaaaaaaaaaaaaaaaaaaaaaaaaaaaaaaaaaaaaaaaaaaaaaaaaaaaaaaaaaaaaaaaaaaaaaaaaaaaaaaaaaaaaaaaaaaaaaaaaaaaa

SEQ ID NO: 1989 - DNA, 1971 bp, Homo sapiens; identical to SEQ ID NO: 1771

SEQ ID NO: 1990 - DNA, 1802 bp, Homo sapiens
ccacgcgtccggacgtcatctggaggagatttgctttctttttctccaaaaggggaggaaattgaaactgagtggcccacgatgggaagaggggaaagcccaggggtacaggaggcctctgggtgaaggcagaggctaacatggggttcggagcgaccttggccgttggcctgaccatctttgtgctgtctgtcgtcactatcatcatctgcttcacctgctcctgctgctgcctttacaagacgtgccgccgaccacgtccggttgtcaccaccaccacatccaccactgtggtgcatgccccttatcctcagcctccaagtgtgccgcccagctaccctggaccaagctaccagggctaccacaccatgccgcctcagccagggatgccagcagcaccctacccaatgcagtacccaccaccttacccagcccagcccatgggcccaccggcctaccacgagaccctggctggaggagcagccgcgccctaccccgccagccagcctccttacaacccggcctacatggatgccccgaaggcggccctctgagcattccctggcctctctggctgccacttggttatgttgtgtgtgtgcgtgagtggtgtgcaggcgcggttccttacgccccatgtgtgctgtgtgtgtccaggcacggttccttacgccccatgtgtgctgtgtgtgtcctgcctgtatatgtggcttcctctgatgctgacaaggtggggaacaatccttgccagagtgggctgggaccagactttgttctcttcctcacctgaaattatgcttcctaaaatctcaagccaaactcaaagaatggggtggtggggggcaccctgtgaggtggcccctgagaggtgggggcctctccagggcacatctggagttcttctccagcttaccctagggtgaccaagtagggcctgtcacaccagggtggcgcagctttctgtgtgatgcagatgtgtcctggtttcggcagcgtagccagctgctgcttgaggccatggctcgtccccggagttgggggtacccgttgcagagccagggacatgatgcaggcgaagcttgggatctggccaagttggactttgatcctttgggcagatgtcccattgctccctggagcctgtcatgcctgttggggatcaggcagcctcctgatgccagaacacctcaggcagagccctactcagctgtacctgtctgcctggactgtcccctgtccccgcatctcccctgggaccagctggagggccacatgcacacacagcctagctgcccccagggagctctgctgcccttgctggccctgcccttcccacaggtgagcagggctcctgtccaccagcacactcagttctcttccctgcagtgttttcattttattttagccaaacattttgcctgttttctgtttcaaacatgatagttgatatgagactgaaacccctgggttgtggagggaaattggctcagagatggacaacctggcaactgtgagtccctgcttcccgacaccagcctcatggaatatgcaacaactcctgtaccccagtccacggtgttctggcagcagggacacctgggccaatgggccatctggaccaaaggtggggtgtggggccctggatggcagctctggcccagacatgaatacctcgtgttcctcctccctctattactgtttcaccagagctgtcttagctcaaatctgttgtgtttctgagtctagggtctgtacacttgtttataataaatgcaatcgtttggaaaaaaaaaaaaaaaagg

SEQ ID NO: 1991 - DNA, 415 bp, Homo sapiens
  misc_feature (77)..(78): n equals a,t,g, or c
  misc_feature (338)..(338): n equals a,t,g, or c
  misc_feature (400)..(400): n equals a,t,g, or c
taaaaaaatatttaggtgmwctatagaaggtmcgcctgcaggtaccggtccggaattcccgggtcgaccccaaaaannttgattagggtgatggttcacgtagtgggccatcgccctgatagacggtttttcgccctttgacgttggagtccacgttcttaatagtggactcttgttccaaactggaacaacactcaaccctatctcggtctattcttttgatttataagggattttgccgatttcggcctattggttaaaaaatgagctgatttaacaaaaatttaacgcgaattttaacaaaatattaacgcttacaatttaggtggcacttttcngggaaatgtgcgcggaacccctattttgttatttttctaaatacattcaaatatgtatccgntcatgccaggtcttg

SEQ ID NO: 1992 - DNA, 1963 bp, Homo sapiens
ggaacaattcaggcttcgctgcgactcagacctcagctccaacatatgcattctgaagaaagatggctgagatggacagaatgctttattttggaaagaaacaatgttctaggtcaaactgagtctaccaaatgcagactttcacaatggttctagaagaaatctggacaagtcttttcatgtggtttttctacgcattgattccatgtttgctcacagatgaagtggccattctgcctgcccctcagaacctctctgtactctcaaccaacatgaagcatctcttgatgtggagcccagtgatcgcgcctggagaaacagtgtactattctgtcgaataccagggggagtacgagagcctgtacacgagccacatctggatccccagcagctggtgctcactcactgaaggtcctgagtgtgatgtcactgatgacatcacggccactgtgccatacaaccttcgtgtcagggccacattgggctcacagacctcagcctggagcatcctgaagcatccctttaatagaaactcaaccatccttacccgacctgggatggagatcaccaaagatggcttccacctggttattgagctggaggacctggggccccagtttgagttccttgtggcctactggaggagggagcctggtgccgaggaacatgtcaaaatggtgaggagtgggggtattccagtgcacctagaaaccatggagccaggggctgcatactgtgtgaaggcccagacattcgtgaaggccattgggaggtacagcgccttcagccagacagaatgtgtggaggtgcaaggagaggccattcccctggtactggccctgtttgcctttgttggcttcatgctgatccttgtggtcgtgccactgttcgtctggaaaatgggccggctgctccagtactcctgttgccccgtggtggtcctcccagacaccttgaaaataaccaattcaccccagaagttaatcagctgcagaagggaggaggtggatgcctgtgccacggctgtgatgtctcctgaggaactcctcagggcctggatctcataggtttgcggaagggcccaggtgaagccgagaacctggtctgcatgacatggaaaccatgaggggacaagttgtgtttctgttttccgccacggacaagggatgagagaagtaggaagagcctgttgtctacaagtctagaagcaaccatcagaggcagggtggtttgtctaacagaacactgactgaggcttaggggatgtgacctctagactgggggctgccacttgctggctgagcaaccctgggaaaagtgacttcatcccttcggtcctaagttttctcatctgtaatgggggaattacctacacacctgctaaacacacacacacagagtctctctctatatatacacacgtacacataaatacacccagcacttgcaaggctagagggaaactggtgacactctacagtctgactgattcagtgtttctggagagcaggacataaatgtatgatgagaatgatcaaggactctacacactgggtggcttggagagcccactttcccagaataatccttgagagaaaaggaatcatgggagcaatggtgttgagttcacttcaagcccaatgccggtgcagaggggaatggcttagcgagctctacagtaggtgacctggaggaaggtcacagccacactgaaaatgggatgtgcatgaacacggaggatccatgaactactgtaaagtgttgacagtgtgtgcacactgcagacagcaggtgaaatgtatgtgtgcaatgcgacgagaatgcagaagtcagtaacatgtgcatgtttgttgtgctccttttttctgttggtaaagtacagaattyagcaaataaaaagggccaccctggccaaaagcggtcaaaaaaaaaaaaaaaaaaaaaaaaaaaaaaaagggcggcc

SEQ ID NO: 1993 - DNA, 1952 bp, Homo sapiens
ccacgcgtccgcgctgcgactcagacctcagctccaacatatgcattctgaagaaagatggctgagatggacagaatgctttattttggaaagaaacaatgttctaggtcaaactgagtctaccaaatgcagactttcacaatggttctagaagaaatctggacaagtcttttcatgtggtttttctacgcattgattccatgtttgctcacagatgaagtggccattctgcctgcccctcagaacctctctgtactctcaaccaacatgaagcatctcttgatgtggagcccagtgatcgcgcctggagaaacagtgtactattctgtcgaataccagggggagtacgagagcctgtacacgagccacatctggatccccagcagctggtgctcactcactgaaggtcctgagtgtgatgtcactgatgacatcacggccactgtgccatacaaccttcgtgtcagggccacattgggctcacagacctcagcctggagcatcctgaagcatccctttaatagaaactcaaccatccttacccgacctgggatggagatcaccaaagatggcttccacctggttattgagctggaggacctggggccccagtttgagttccttgtggcctactggaggagggagcctggtgccgaggaacatgtcaaaatggtgaggagtgggggtattccagtgcacctagaaaccatggagccaggggctgcatactgtgtgaaggcccagacattcgtgaaggccattgggaggtacagcgccttcagccagacagaatgtgtggaggtgcaaggagaggccattcccctggtactggccctgtttgcctttgttggcttcatgctgatccttgtggtcgtgccactgttcgtctggaaaatgggccggctgctccagtactcctgttgccccgtggtggtcctcccagacaccttgaaaataaccaattcaccccagaagttaatcagctgcagaagggaggaggtggatgcctgtgccacggctgtgatgtctcctgaggaactcctcagggcctggatctcataggtttgcggaagggcccaggtgaagccgagaacctggtctgcatgacatggaaaccatgaggggacaagttgtgtttctgttttccgccacggacaagggatgagagaagtaggaagagcctgttgtctacaagtctagaagcaaccatcagaggcagggtggtttgtctaacagaacactgactgaggcttaggggatgtgacctctagactgggggctgccacttgctggctgagcaaccctgggaaaagtgacttcatcccttcggtcctaagttttctcatctgtaatgggggaattacctacacacctgctaaacacacacacacagagtctctctctatatatacacacgtacacataaatacacccagcacttgcaaggctagagggaaactggtgacactctacagtctgactgattcagtgtttctggagagcaggacataaatgtatgatgagaatgatcaaggactctacacactgggtggcttggagagcccactttcccagaataatccttgagagaaaaggaatcatgggagcaatggtgttgagttcacttcaagcccaatgccggtgcagaggggaatggcttagcgagctctacagtaggtgacctggaggaaggtcacagccacactgaaaatgggatgtgcatgaacacggaggatccatgaactactgtaaagtgttgacagtgtgtgcacactgcagacagcaggtgaaatgtatgtgtgcaatgcgacgagaatgcagaagtcagtaacatgtgcatgtttgttgtgctccttttttctgttggtaaagtacagaatttagcaaataaaaagggccaccctggccaaaagcggtcaaaaaaaaaaaaaaaaaaaaaaaaaaaaaaaagg

SEQ ID NO: 1994 - DNA, 760 bp, Homo sapiens; identical to SEQ ID NO: 1954
  misc_feature (689)..(689): n equals a,t,g, or c
  misc_feature (757)..(757): n equals a,t,g, or c

SEQ ID NO: 1995 - DNA, 1234 bp, Homo sapiens
  misc_feature (43)..(43): n equals a,t,g, or c
  misc_feature (72)..(72): n equals a,t,g, or c
  misc_feature (1222)..(1222): n equals a,t,g, or c
  misc_feature (1230)..(1231): n equals a,t,g, or c
tgcaatttcctactaaatccagtctgtcaagatggttttggtnggtgttttttgagctccactccagcctgncaccagagcgagctccmtctcaaaaaaaaaaaaaaaagtaagaaagaaaaggactcccttagaatgggaaagaaaaatcataaaatattgagctgatgcctgtatatagaaattaagcgtttctcgaaagctgttctatgttttgctgttattttagtctttattctcttcctttaggtggagaaacaaagtaccaatttgaagggattttttttattttgtcttttggtttctgtcagtagaaataaccatatgtgctaaccaaatttctgtgaagaatgttttcatggttatcattatatctaactataacctcccccatagttatgaagagtaacctgaaatgccactattgtggaaataggataattgtaattgtgaaaaaataattttaaggaaatcttacaagtattacattaaaaagatactatgactgccacctgccatttaccttctaataaccctgccatgtggtttgcagaaagagatggatatagtagcctcagaagaaatattttatgtgggttttttgtttttcgttactagatttcatggatgaggggatatggttgaccttttactttttaatggagcagccagtttttgttaattactcacttgtaaattgtgagattctgaattccttacctgctattcttgtacttgtctcaggccaaatctatgctgtggttcttatgagacttgtatgaagatgccctgatttgtacagattgaccacgggaatactactgccatgtaatctgtatagttccagataatttgtcatgaacattgacagaatgacaattttttgtatttgctttttctccctttaagagcacattcttctgtaaggagaaaggcagcattctggctaaaatgtgtagaaggtaatttactacacttataaaatagtgtgacttttgtgaaaattttgaattagctttcatatgaagtgccttaagtagactcttcatttacttttctggtaatggtttaaatatcatttgttatgcatttttaagatacagttcagaatgacacattgtagtggcaaagataaccaaatgtctggctgtttgctttttgaccatatcaataaacttttacaatctaaaaaaaaaaaaaaaaaaaaaaaagggsggccgcnctaggggnncca

SEQ ID NO: 1996 - DNA, 1778 bp, Homo sapiens
ccggcgagcagtggccgttacggccgaaaagatggcggtcttggcacctctaattgctctcgtgtattcggtgccgcgactttcacgatggctcgcccaaccttactaccttctgtcggccctgctctctgctgccttcctactcgtgaggaaactgccgccgctctgccacggtctgcccacccaacgcgaagacggtaacccgtgtgactttgactggagagaagtggagatcctgatgtttctcagtgccattgtgatgatgaagaaccgcagatccatgccccatgaagagggacaaagaatgggatataggagtgcacagcccagcctgacctgtgacatctctgtgtttcagtcactgtggagcaacatataggcaacattttcatgtttagtaaagtggccaacacaattcttttcttccgcttggatattcgcatgggcctactttacatcacactctgcatagtgttcctgatgacgtgcaaaccccccctatatatgggccctgagtatatcaagtacttcaatgataaaaccattgatgaggaactagaacgggacaagagggtcacttggattgtggagttctttgccaattggtctaatgactgccaatcatttgcccctatctatgctgacctctcccttaaatacaactgtacagggctaaattttgggaaggtggatgttggacgctatactgatgttagtacgcggtacaaagtgagcacatcacccctcaccaagcaactccctaccctgatcctgttccaaggtggcaaggaggcaatgcggcggccacagattgacaagaaaggacgggctgtctcatggaccttctctgaggagaatgtgatccgagaatttaacttaaatgagctataccagcgggccaagaaactatcaaaggctggagacaatatccctgaggagcagcctgtggcttcaacccccaccacagtgtcagatggggaaaacaagaaggataaataagatcctcactttggcagtgcttcctctcctgtcaattccaggctctttccataaccacaagcctgaggctgcagccttttatttatgttttccctttggctgtgactgggtggggcagcatgcagcttctgattttaaagaggcatctagggaattgtcaggcaccctacaggaaggcctgccatgctgtggccaactgtttcactggagcaagaaagagatctcataggacggagggggaaatggtttccctccaagcttgggtyagtgtgttaactgcttatcagctattcagacatctccatggtttctccatgaaactctgtggtttcatcattccttcttagttgacctgcacagcttggttagacctagatttaaccctaaggtaagatgctggggtatagaacgctaagaattttcccccaaggactcttgcttccttaagcccttctggcttcgtttatggtcttcattaaaagtataagcctaactttgtcgctagtcctaaggagaaacctttaaccacaaagtttttatcattgaagacaatattgaacaaccccctattttgtggggattgagaaggggtgaatagaggcttgagactttcctttgtgtggtaggacttggaggagaaatcccctggactttcactaaccctctgacatactccccacacccagttgatggctttccgtaataaaaagattgggatttccttttgaaaaaaaaaaaaaaaaaaaaaaaaaaaaaaaaaaaaaaaaaaaaaaaaaaag

SEQ ID NO: 1997 - DNA, 589 bp, Homo sapiens
  misc_feature (531)..(531): n equals a,t,g, or c
  misc_feature (549)..(549): n equals a,t,g, or c
  misc_feature (559)..(559): n equals a,t,g, or c
  misc_feature (574)..(574): n equals a,t,g, or c
gacggccgaaaagatggcggtcttggcacctctaattgctctcgtgtattcggtgccgcgactttcacgatggctcgcccaaccttactaccttctgtcggccctgctctctgctgccttcctactcgtgaggaaactgccgccgctctgccacggtctgcccacccaacgcgaagacggtaacccgtgtgactttgactggagagaagtggagatcctgatgtttctcagtgccattgtgatgatgaagaaccgcagatccatgttcctgatgacgtgcaaaccccccctatatatgggccctgagtatatcaagtacttcaatgataaaaccattgatgaggaactagaacgggacaagagggtcacttggattgtggagttctttgccaattggtctaatgactgccaatcatttgcccctatctatgctgacctctcccttaaatacaactgtacagggctaaattttgggaaagtggatgttggacgctatactgatgttagtacgcggtacaaagtgagcacatnacccctcaaccaagcaantccctacccngatctgttccaaggnggcaagggaggcaat

SEQ ID NO: 1998 - DNA, 1563 bp, Homo sapiens
cgaaaagatggcggtcttggcacctctaattgctctcgtgtattcggtgccgcgactttcacgatggctcgcccaaccttactaccttctgtcggccctgctctctgctgccttcctactcgtgaggaaactgccgccgctctgccacggtctgcccacccaacgcgaagacggtaacccgtgtgactttgactggagagaagtggagatcctgatgtttctcagtgccattgtgatgatgaagaaccgcagatccatgttcctgatgacgtgcaaaccccccctatatatgggccctgagtatatcaagtacttcaatgataaaaccattgatgaggaactagaacgggacaagagggtcacttggattgtggagttctttgccaattggtctaatgactgccaatcatttgcccctatctatgctgacctctcccttaaatacaactgtacagggctaaattttgggaaggtggatgttggacgctatactgatgttagtacgcggtacaaagtgagcacatcacccctcaccaagcaactccctaccctgatcctgttccaaggtggcaaggaggcaatgcggcggccacagattgacaagaaaggacgggctgtctcatggaccttctctgaggagaatgtgatccgagaatttaacttaaatgagctataccagcgggccaagaaactatcaaaggctggagacaatatccctgaggagcagcctgtggcttcaacccccaccacagtgtcagatggggaaaacaagaaggataaataagatcctcactttggcagtgcttcctctcctgtcaattccaggctctttccataaccacaagcctgaggctgcagccttttatttatgttttccctttggctgtgactgggtggggcagcatgcagcttctgattttaaagaggcatctagggaattgtcaggcaccctacaggaaggcctgccatgctgtggccaactgtttcactggagcaagaaagagatctcataggacggagggggaaatggtttccctccaagcttgggttagtgtgttaactgcttatcagctattcagacatctccatggtttctccatgaaactctgtggtttcatcattccttcttagttgacctgcacagcttggttagacctagatttaaccctaaggtaagatgctggggtatagaacgctaagaattttcccccaaggactcttgcttccttaagcccttctggcttcgtttatggtcttcattaaaagtataagcctaactttgtcgctagtcctaaggagaaacctttaaccacaaagtttttatcattgaagacaatattgaacaaccccctattttgtggggattgagaaggggtgaatagaggcttgagactttcctttgtgtggtaggacttggaggagaaatcccctggactttcactaaccctctgacatactccccacacccagttgatggctttccgtaataaaaagattgggatttccttttgaaaaaaaaaaaaaaaaaaaaaaaaaaaaaaaaaaaaaaaaaaaaaaaaaaaa

SEQ ID NO: 1999 - DNA, 1377 bp, Homo sapiens
ggcacgagaaaaccttgaggtgattcatcttccaggctctccttccatcaagtctctcctccctagcgctctgggtccttaatggcagcagccgccgctaccaagatccttctgtgcctcccgcttctgctcctgctgtccggctggtcccgggctgggcgagccgaccctcactctctttgctatgacatcaccgtcatccctaagttcagacctggaccacggtggtgtgcggttcaaggccaggtggatgaaaagacttttcttcactatgactgtggcaacaagacagtcacacctgtcagtcccctggggaagaaactaaatgtcacaacggcctggaaagcacagaacccagtactgagagaggtggtggacatacttacagagcaactgcgtgacattcagctggagaattacacacccaaggaacccctcaccctgcaggccaggatgtcttgtgagcagaaagctgaaggacacagcagtggatcttggcagttcagtttcgatgggcagatcttcctcctctttgactcagagaagagaatgtggacaacggttcatcctggagccagaaagatgaaagaaaagtgggagaatgacaaggttgtggccatgtccttccattacttctcaatgggagactgtataggatggcttgaggacttcttgatgggcatggacagcaccctggagccaagtgcaggagcaccactcgccatgtcctcaggcacaacccaactcagggccacagccaccaccctcatcctttgctgcctcctcatcatcctcccctgcttcatcctccctggcatctgaggagagtcctttagagtgacaggttaaagmtgataccaaaargcycctgtgagcacggtcttgatcaamctcgcccttctgtctggccagctgcccacgacctacggtgtatgtccagtggcctccagcagatcatgatgacatcatggacccaatagctcattcactgccttgattccttttgccaacaattttaccagcagttatacctaacatattatgcaattttctcttggtgctacctgatggaattcctgcacttaaagttctggctgactaaacaagatatatcattttctttcttctctttttgtttggaaaatcaagtacttctttgaatgatgatctctttcttgcaaatgatattgtcagtaaaataatcacgttagacttcagacctctggggattctttccgtgtcctgaaagagaatttttaaattatttaataagaaaaaatttatattaatgattgtttcctttagtaatttattgttctgtactgatatttaaataaagagttctatttcccaaaaaaaaaaaaaaaaaaaaaaaaa

SEQ ID NO: 2000 - DNA, 557 bp, Homo sapiens
  misc_feature (508)..(508): n equals a,t,g, or c
  misc_feature (513)..(513): n equals a,t,g, or c
gggatccaccttgattaaatctcttgtccccagccctcctggtccccaatggcagcagccgccatcccagctttgcttctgtgcctcccgcttctgttcctgctgttcggctggtcccgggctaggcgagacgaccctcactctctttgctatgacatcaccgtcatccctaagttcagacctggaccacggtggtgtgcggttcaaggccaggtggatgaaaagacttttcttcactatgactgtggcaacaagacagtcacacccgtcagtcccctggggaagaaactaaatgtcacaatggcctggaaagcacagaacccagtactgagagaggtggtggacatacttacagagcaactgcttgacattcagctggagaattacacacccaaggaacccctcaccctgcaggcaaggatgtcttgtgagcagaaagctgaaggacacagcagtggatcttggcagttcagtatcgatggacagaccttcctactctttgactcanagaanagaatgtggaccaacggttcatcctggagataaaaggaatgcaa

SEQ ID NO: 2001 - DNA, 1377 bp, Homo sapiens
ggcacgagaaaaccttgaggtgattcatcttccaggctctccttccatcaagtctctcctccctagcgctctgggtccttaatggcagcagccgccgctaccaagatccttctgtgcctcccgcttctgctcctgctgtccggctggtcccgggctgggcgagccgaccctcactctctttgctatgacatcaccgtcatccctaagttcagacctggaccacggtggtgtgcggttcaaggccaggtggatgaaaagacttttcttcactatgactgtggcaacaagacagtcacacctgtcagtcccctggggaagaaactaaatgtcacaacggcctggaaagcacagaacccagtactgagagaggtggtggacatacttacagagcaactgcgtgacattcagctggagaattacacacccaaggaacccctcaccctgcaggccaggatgtcttgtgagcagaaagctgaaggacacagcagtggatcttggcagttcagtttcgatgggcagatcttcctcctctttgactcagagaagagaatgtggacaacggttcatcctggagccagaaagatgaaagaaaagtgggagaatgacaaggttgtggccatgtccttccattacttctcaatgggagactgtataggatggcttgaggacttcttgatgggcatggacagcaccctggagccaagtgcaggagcaccactcgccatgtcctcaggcacaacccaactcagggccacagccaccaccctcatcctttgctgcctcctcatcatcctcccctgcttcatcctccctggcatctgaggagagtcctttagagtgacaggttaaagctgataccaaaaggctcctgtgagcacggtcttgatcaaactcgcccttctgtctggccagctgcccacgacctacggtgtatgtccagtggcctccagcagatcatgatgacatcatggacccaatagctcattcactgccttgattccttttgccaacaattttaccagcagttatacctaacatattatgcaattttctcttggtgctacctgatggaattcctgcacttaaagttctggctgactaaacaagatatatcattttctttcttctctttttgtttggaaaatcaagtacttctttgaatgatgatctctttcttgcaaatgatattgtcagtaaaataatcacgttagacttcagacctctggggattctttccgtgtcctgaaagagaatttttaaattatttaataagaaaaaatttatattaatgattgtttcctttagtaatttattgttctgtactgatatttaaataaagagttctatttcccaaaaaaaaaaaaaaaaaaaaaaaaa

SEQ ID NO: 2002 - DNA, 1013 bp, Homo sapiens
  misc_feature (8)..(8): n equals a,t,g, or c
  misc_feature (10)..(10): n equals a,t,g, or c
  misc_feature (12)..(12): n equals a,t,g, or c
  misc_feature (15)..(15): n equals a,t,g, or c
  misc_feature (664)..(664): n equals a,t,g, or c
  misc_feature (998)..(998): n equals a,t,g, or c
cgccgtgntnangcntctggagccggtgascgtgggtctcgcggtatcattgcagcactggggccagatggtaagccctcccgtatcgtagttatctacacgacggggagtcaggcaactatggatgaacgaaatagacagatcgctgagataggtgcctcactgattaagcattggtaactgtcagaccaagtttwctcatatatactytagattgatttaaaacttcatttttaatttaaaaggatctaggtgaagatcctttttgataatctcatgccataacttcgtataatgtatgctatacgaagttatggcatgaccaaaatcccttaacgtgagttttcgttccactgagcgtcagaccccgtagaaaagatcaaaggatcttcttgagatcctttttttctgcgcgtaatctgctgcttgcaaacaaaaaaaccaccgctaccagcggtggtttgtttgccggatcaagagctaccaactctttttccgaaggtaactggcttcagcagagcgcagataccaaatactgttcttctagtgtagccgtagttaggccaccacttcaagaactctgtagcaccgcctacatacctcgctctgctaatcctgttaccagtggctgctgccagtggcgataagtcgtgtcttaccgggnttggactcaagacgatagttaccggataaggcgcagcggtcgggctgaacggggggttcgtgcacacagcccagcttggagcgaacgacctacaccgaactgagatacctacagcgtgagctatgagaaagcgccacgcttcccgaagggagaaaggcggacaggtatccggtaagcggcagggtcggaacaggagagcgcacgagggagcttycagggggaaacgcctggtatctttatagtcctgtcgggtttcgccacctctgacttgagcgcgatttttgggatctcgtcaggggggcggagcctatggaaaaaccgccagcaacgcggnctttttaccggtcct

SEQ ID NO: 2003 - DNA, 1104 bp, Homo sapiens; identical to SEQ ID NO: 1722
  misc_feature (1100)..(1100): n equals a,t,g, or c

SEQ ID NO: 2004 - DNA, 1075 bp, Homo sapiens; identical to SEQ ID NO: 1723

SEQ ID NO: 2005 - DNA, 2790 bp, Homo sapiens
  misc_feature (55)..(55): n equals a,t,g, or c
  misc_feature (79)..(79): n equals a,t,g, or c
  misc_feature (138)..(138): n equals a,t,g, or c
  misc_feature (162)..(162): n equals a,t,g, or c
  misc_feature (174)..(174): n equals a,t,g, or c
  misc_feature (333)..(333): n equals a,t,g, or c
tccagataaaacccggttcttcctccaaaccgaccacatgccaacgtgacctcgncattagttccaagttggatccaanttttgttaaaaaagtcccatgggtgcttcccagatcgtaaagttaaagccggcccgttnctgtcgcattctccgtcaggccgnacgccctgtctncagcacttgcgtggtaccgagacaccgaagggtgctccaggcamacktcgcarccaracagccctcccgaaaagccagtaactcgtccctttcaagctacgggtgccaaggatagtgccgcccttcagggtctctaagctgtagggggctgtggcaggnccaccccatgraggctcttggtaggggggagcccgggctggaccgccaggggaagaaaccgctgtcgkggggcgcgactgctcctcctgtagactcctaaaatcaccgcagtccggctgaggaggagggatgtcgggctccccagaattggagtcctgcaacgcagtgggcccttccttctgtacctcctcagggtttgaagaactgctggccggggccttactccgcgccgctggggacaccggcagagctggcttcttgaagtccccactgaggtcttgcgacgccagggtctctgactgagagagaatgtcagccatcctcaaccggtgcaayttcgaaatccgctcyttcgaaacccacccttcggtctttacgttcctgtccacgtcccactctcccaagctcccartggcgtctgtaggcggcgatggtgaagttgctccttcacgacctggagcgttgcgaagtggtgctaacatgagaaggtcataatatgagaaaaacaaaacggttatcgggatgctgtgcagaacggggacatatttagaggttacaacgggatcgtaatgacttcctgttgcatagcttgattgagaagaagcgcttccggcggtcttagatcactaatcaacaaaccagctttcggggtctgacgcgatccttgcctcaggcctctcgaggtccagacagccgcccagcccgctctgcgacgcagcagtgaatagtgtggtacctccttgtctcggttcaggtccagacctccccgtcttccggctgccctgaacgtcaggcgacctcaggaccctgtgattggcgcctgcgccggcggaccgtgaccgaggaaacccctggagggacttgggcattccttgggctccgtgcctgttcttcgtgctcctttcgggcaaggatctcacattatcagtctttgaccgacacagaatgcctggcatttgataaatgtttgttgaacttgaagagacatatggacaatgaatctgcaaagatactggggagagataccaatatcatcaagccagaccaacagaagttccttcgatttgctcccacgggagttccgtctggtggaagtccatgacccacccctgcaccaaccctcagccaacaagccgaagccccccactatgctggacatcccctcagagccatgtagtctcaccatccatacgattcagttgattcagcacaaccgacgtcttcgcaaccttattgccacagctcaggcccagaatcagcagcagacagaaggtgtaaaaactgaagagagtgaacctcttccctcgtgccctgggtcacctcctctccctgatgacctcctgcctttagattgtaagaatcccaatgcaccattccagatccggcacagtgacccagagagtgacttttatcgtgggaaaggggaacctgtgactgaactcagctggcactcctgtcggcagctcctctaccaggcagtggccacaatcctggcccacgcgggctttgactgtgctaatgagagtgtcctggagaccctaactgatgtggcacatgagtattgccttaagtttaccaagttgctgcgttttgctgtggaccgggaggcccggctgggacagactccttttcctgatgtgatggagcaggtattccatgaagtgggtattggcagtgtgctctccctccagaagttctggcagcaccgcatcaaggactatcacagttacatgctacagattagtaagcaactctctgaagaatatgaaaggattgtcaatcctgagaaggccacagaggacgctaaacctgtgaagatcaaggaggaacctgtgagcgacatcacttttcctgtcagtgaggagctggaggctgaccttgcttctggagaccagtcactgcctatgggagtgcttggggctcagagcgaacgcttcccatctaacctggaggttgaagcttcaccacaggcttcaagtgcagaggtaaatgcttctcctctttggaatctggcccatgtgaaaatggagcctcaagaaagtgaagaaggcaatgtctctgggcatggtgtgctgggcagtgatgtcttcgaggagcctatgtcaggcatgagtgaagctgggattcctcagagccctgatgactcagatagcagctatggttcccactccactgacagcctcatggggtcctcccctgttttcaaccagcgctgcaagaagaggatgaggaaaatataaaaggaaaagagggagatgttttgtccagacctactagacccaacagaaaaggtttttgtattagaatctgtttccttaaaaattgatttgactcctgttcttaaacacaagtggtttttcctaattccagaggaactggacgtcaccaaacaaggttgcattttacttttgcaaaaaaaaaaaaaaaaaaaaaaaaaaaaaaaaaaagggcggccgc

SEQ ID NO: 2006 - DNA, 1168 bp, Homo sapiens
acgcgtccgggattttttagcttgcaaaaaaaatgagcaccaaacctgatatgattcaaaagtgtttgtggcttgagatccttatgggtatattcattgctggcaccctatccctggactgtaacttactgaacgttcacctgagaagagtcacctggcaaaatctgagacatctgagtagtatgagcaattcatttcctgtagaatgtctacgagaaaacatagcttttgagttgccccaagagtttctgcaatacacccaacctatgaagagggacatcaagaaggccttctatgaaatgtccctacaggccttcaacatcttcagccaacacaccttcaaatattggaaagagagacacctcaaacaaatccaaataggacttgatcagcaagcagagtacctgaaccaatgcttggaggaagacgagaatgaaaatgaagacatgaaagaaatgaaagagaatgagatgaaaccctcagaagccagggtcccccagctgagcagcctggaactgaggagatatttccacaggatagacaatttcctgaaagaaaagaaatacagtgactgtgcctgggagattgtccgagtggaaatcagaagatgtttgtattacttttacaaatttacagctctattcaggaggaaataagaatcatctaccttcaagcaagaattaacagagattgtggctacgcaaatgcaccaaaaaagggtgaaatatatctgaaatgtacctggttctgcccttggaagccacttcctgctcatgccactaacagcatgctgccaaactgttcagattcaagattattccaagcgcagggcccaaatgttatagccaaagaaagtcttatgataaaagtgaggcaaatttcagccaagaagttagaagagatgtttaaaagaacaagaacaaattgtggatcatggtatatgcaggctatcagcagaaggatcagacaataaaatgagttagtgcaaaccatttagtaaaaataactatcagcagagttgttccagattaaaaatagtactacaagcttgtaaaggagttaggacatgcaagctactgagcataaaatatatacttgctatttttcatgactttctctaataaagtctttgactgttctctctaataaaaaaaaaaaaaaaaaaaaa

SEQ ID NO: 2007 - DNA, 1183 bp, Homo sapiens
  misc_feature (1110)..(1110): n equals a,t,g, or c
  misc_feature (1115)..(1115): n equals a,t,g, or c
  misc_feature (1181)..(1181): n equals a,t,g, or c
gggggcctcctccactgggtccgaatcagtaggtgaccccgcccctggattctggaagacctcaccatgggacgcccccgacctcgtgcggccaagacgtggatgttcctgctcttgctggggggagcctgggcagcgtgtggaagcctggacctcctcactaagttgtatgcggagaacttgccgtgtgtccatttgaacccacagtggccttcccagccctcgcactgccccagagggtggcgatccaaccctctccctcctgctgcaggacactccagggcacaggaggacaaggtgctggggggtcatgagtgccaaccccattcgcagccttggcaggcggccttgttccagggccagcaactactctgtggcggtgtccttgtaggtggcaactgggtccttacagctgcccactgtaaaaaaccgaaatacacagtacgcctgggagaccacagcctacagaataaagatggcccagagcaagaaatacctgtggttcagtccatcccacacccctgctacaacagcagcgatgtggaggaccacaaccatgatctgatgcttcttcaactgcgtgaccaggcatccctggggtccaaagtgaagcccatcagcctggcagatcattgcacccagcctggccagaagtgcaccgtctcaggctggggcactgtcaccagtccccgagagaattttcctgacactctcaactgtgcagaagtaaaaatctttccccagaagaagtgtgaggatgcttacccggggcagatcacagatggcatggtctgtgcaggcagcagcaaaggggctgacacgtgccagggcgattctggaggccccctggtgtgtgatggtgcactccagggcatcacatcctggggctcagacccctgtgggaggtccgacaaacctggcgtctataccaacatctgccgctacctggactggatcaagaagatcataggcagcaagggctgattctaggataagcactagatctcccttaataaactcacaactctctggttcaaaaaaaaaaaaaaaaaaaaaaaaaaaaaaaaaaaaaaaaaaaaaaaaaaaaaaaaaaaaaaaaagggcggccgntctanaggatccctcgaggggcccaagcttacgcgtgcatgcgacgtcatagctctctccctatagggagncg

SEQ ID NO: 2008 - DNA, 139 bp, Homo sapiens
tggtcacctcttccctcagacccgggagtctaggcccttcttctcccaggacccagcagtcctagctccctcttgactctggaccccaaaatctggacctccaatgaagctgtccctttgggactccagaaaaaaaaaa

SEQ ID NO: 2009 - DNA, 698 bp, Homo sapiens
  misc_feature (604)..(604): n equals a,t,g, or c
  misc_feature (610)..(610): n equals a,t,g, or c
  misc_feature (625)..(625): n equals a,t,g, or c
  misc_feature (628)..(628): n equals a,t,g, or c
  misc_feature (630)..(630): n equals a,t,g, or c
  misc_feature (688)..(688): n equals a,t,g, or c
gctggggcctcctccactgggtccgaatcagtaggtgaccccgcccctggattctggaagacctcaccatgggacgcccccgacctcgtgcggccaagacgtggatgttcctgctcttgctggggggagcctgggcaggacactccagggcacaggaggacaaggtgctggggggtcatgagtgccaaccccattcgcagccttggcaggcggccttgttccagggccagcaactactctgtggcggtgtccttgtaggtggcaactgggtccttacagctgcccactgtaaaaaaccgaaatacacagtacgcctgggagaccacagcctacagaataaagatggcccagagcaagaaatacctgtggttcagtccatcccacacccctgctacaacagcagcgatgtggaggaccacaaccatgatctgatgcttcttcaactgcgtgaccaggcatccctggggtccaaagtgaagcccatcagcctggcagatcattgcacccagcctggcagaagtgcaccgtctcaagctggggcactgtcaccagtccccgagagacagggtttcgccatgttgaccaaggcttggtctcgaamttncttganctyaagtggatctgnccngncttgggccttaccmaaaatggcttggggaattaccaagccattggaagcccaaccggnccccttgggg

SEQ ID NO: 2010 - DNA, 1065 bp, Homo sapiens
ccacgcgtccgggcctcctccactgggtccgaatcagtaggtgaccccgcccctggattctggaagacctcaccatgggacgcccccgacctcgtgcggccaagacgtggatgttcctgctcttgctggggggagcctgggcagcgtgtggaagcctggacctcctcactaagttgtatgcggagaacttgccgtgtgtccatttgaacccacagtggccttcccagccctcgcactgccccagagggtggcgatccaaccctctccctcctgctgcaggacactccagggcacaggaggacaaggtgctggggggtcatgagtgccaaccccattcgcagccttggcaggcggccttgttccagggccagcaactactctgtggcggtgtccttgtaggtggcaactgggtccttacagctgcccactgtaaaaaaccaaaatacacagtacgcctgggagaccacagcctacagaataaagatggcccagagcaagaaatacctgtggttcagtccatcccacacccctgctacaacagcagcgatgtggaggaccacaaccatgatctgatgcttcttcaactgcgtgaccaggcatccctggggtccaaagtgaagcccatcagcctggcagatcattgcacccagcctggccagaagtgcaccgtctcaggctggggcactgtcaccagtccccgagagaattttcctgacactctcaactgtgcagaagtaaaaatctttccccagaagaagtgtgaggatgcttacccggggcagatcacagatggcatggtctgtgcaggcagcagcaaaggggctgacacgtgccagggcgattctggaggccccctggtgtgtgatggtgcactccagggcatcacatcctggggctcagacccctgtgggaggtccgacaaacctggcgtctataccaacatctgccgctacctggactggatcaagaagatcataggcagcaagggctgattctaggataagcactagatctcccttaataaactcacaactctctggttcaaaaaaaaaaaaaaaaaaaaaa

SEQ ID NO: 2011 - DNA, 969 bp, Homo sapiens; identical to SEQ ID NO: 576

SEQ ID NO: 2012 - DNA, 1047 bp, Homo sapiens
cccacgcgtccgatttcaccctgttggccaggctggccttgaactcctgatctcgtgattcacccaccttggcctcccaaagtgctgggattacaggcatgagccaccgcgcctggcctccccttcttttatcaacagcattctcctttttctttgggaaactacctgcatgtagtcttgctaggactgctgggaaactggtacaccagtcaagactttctcccccagacctgagatcttgagaaatgacataaggtctgaaaactgaagttgatctgttccaatggtggcctaaagagatcactcccatcagtttctgctctccctacccacaggactgctctgacttctcttcttcttggagctgctgttagactgtccttttgtaaatggaacttcccctgtccttccagtaaattcctatattgcttatgtgaaccagtgtcctcatgtgttacttacgcccagagaatcctaatccatatactacctaccctaatctatacatgacctctccttcttcactgcaaaggtccacttcagactctcacttttcacctggactgttagaatgcctctccttaagtggtctcctaaattccagattctcctcttacagttactcaaaaaatatttttttgtatgttggcatttgtatagcagtttgttagagtgctaagtgctggggatctcataaaataaacaggcaaggtttaggtcctcatatagtatagagtgggaggcaggtaatgcttagataatcatgcaaaaaattatagaccatggttatgtgctacaatggaaaatacagagtgctgtgaaactaacaggggaacatggcccaatacgtggggaaaggacggtatcagtcaagggaggcttcccccatggactaaccttaacgcgaagatggggatgctagggaagggaagaagaagatggagctttccaggcagaggggatagcaagtgcaaacaccctaagatggaaggtttaaggaagtcataaaagccaagtgtggcaggaacacagaaaaaaaaaaaaaaa

SEQ ID NO: 2013 - DNA, 982 bp, Homo sapiens
  misc_feature (109)..(110): n equals a,t,g, or c
agctgagtgctagaatatatttaagaatactttactgactgtcagttcaagcaaaaaacaaagcaaacaaaaacctgctgctttgaaataagggctatttgcttcctannagctttctttcgcctcacaacctgtctttccagtttattagcttttgtagcaattacatcgattgaagagtgaccatacaaataggtctgcattttggaaatgggtgctgtgcatgctgagtggtgtctctgagtgtgaatcctggtgaaaggatgaaggaggcatctcgccccatattttctctccctgaactggtctgtctcagttctgctttctgatcatttcccctgttggcagaacctgcccttgaccctcagccacagtgagtcagtgtacactgggcacgactccagatgcctgggggataaaactttgcccaagtttgccaatcattcctcgaagctgcccagttgttctagtctttgttgatgtttcctagaaaattttggctccacattkgtcatggttacttagtttatttgacagcatgtcttgctttgtgttggatactttagaggatacagcagtaagacttgggcactgtcttggagtagctcaaagaagaggaagataaataataataaccttttaaaaatcggccaggcatgstggcttacgcctgtgatcccagcactttgggaggccgagtcagggggatcacttgaggtcaggagttcaagaccagcctggcaaacatggcaaaaccctgtctttactaaaaaaaaatacaaaaattagcgggatatggcggtgcatgcccttaatcccatctactctggaggctgaggcaggagaatcgcttgaatccgggagacggaggtttcagtgagccaagatcgtggcactgcactccagcctgggcaacagagtgagactccatctccaaaaaaaaaaaaaaaaaaaaaaaaaaaaaaaaaaaaagggcggccgc

SEQ ID NO: 2014 - DNA, 811 bp, Homo sapiens
  misc_feature (15)..(15): n equals a,t,g, or c
  misc_feature (804)..(804): n equals a,t,g, or c
ctcctttaggggttngcggccaaccccyctggacgtsctccctaccgggaaagcctgggccgtctttytaggytgatggcagggccagcccggggcgtcctgaggcctgccctgcggacatgccccttgttctaggtggtgtggctgcccggcctgcgtgtgagaccagctgtctgtgcttcaggccatggaggctgagtgtttccagcctgtccccttgctcggctctccctctggggaagcccctgcagcccattctctgcctccgcttctgccatctgtgcctttgtctgcttcctgtttggaggtggtcatccctggggccacccctcatgatctggacacgagtctccatcctgaagccaccacccaaacccctgtgcctcaaacccctcccacccaccacatggggttccactgtgaccaactcagcagctgatgaagcttcccttggggctctcctagcaacggggagctggctttcccggaggcctggcctctccctaagtggaagtggrgcgtgagggtgtcaagcctttttctgctgsctggtgctctaggttggcttggcacccctggaagcacttgccatccttatacaggaccccamacccamcttcccggcttctaccccttctttcaaggggkcatctctggsttcccttcccamccaacctyamccacgtggtccggccaagcaaccttttgacccccaacatgacaaaataaaccttccttggccggcaattcatttaattcaagaattgggtgcttccctggggacyttggcgcttggggtcccgnggaggac

SEQ ID NO: 2015 - DNA, 429 bp, Homo sapiens
  misc_feature (353)..(353): n equals a,t,g, or c
  misc_feature (378)..(378): n equals a,t,g, or c
  misc_feature (394)..(394): n equals a,t,g, or c
  misc_feature (410)..(410): n equals a,t,g, or c
ttgatgcaagttgagttgatttttgcatgtggtgtaagggctggtccagcctcatgctctgggctcttgattcacttctcttcttttctcacgcccagctggttccgctgggtggcggggaggagtggggaagtcccgggctgggcctgcactcgatcatcccctctcaggccagccagggagtctcagctcctgcccaggacctggctggacgtgctccctaccgggaaagcctgggccgtctttctaggctgatggcagggccagcccggggcgtcctgaggcctgccctgcggacatgccccttgttctaggtggtgtggctgcccggcctgcgtgtgagaccagctgtntgtgcttcaggccatggaggctgantgtttccaagcctgtncccttgctcggctctncctctgggggaaacccctt

SEQ ID NO: 2016 - DNA, 1186 bp, Homo sapiens
  misc_feature (1103)..(1103): n equals a,t,g, or c
  misc_feature (1109)..(1109): n equals a,t,g, or c
acatcgatacgacttttttttttttttttttttttttttttttaacttgctacagcagctatggtttattctttttttttttttttacacrtgttcctggggctcatggaatttactagtttattataaaggatattacaaaggatacaggggaagagatgtgtagggcaaggtatgggggagggacgcagagcttccatgtgctccccaggcgctccaccctccaggagcctccacatgctcatccatccagaagctcccggaaccccatccttctgagtgttcacggaggcctcattacgaaggcatgattgattcaatcattggccgctgatgatctgcttaaccttcagcccctctcccctacctggaggttgcggggtggtgctgaaccttgtgattctacctggtcttccctgggaaccatcctgaagctgccagctggtctgtcaatcatgagcatccaaaaagacatcactttggagattccaaggattttaggagttgtgtgccaggaaatggagatgaaaaccaagtgtatatttcacaacatgacagtcagtctctttcaaccccagtcttacttcctgccgtgctgccggcctyarccccccgcgccccagggcctttgaacacattgccggttgcctgcagcgatcgcctctgcctgctgggtttgagcctggtttactcccctcatccttctgcgctcagcccgaaggtgtccccccgaggcagccctcctgacctggtcctacgaaccccaggttctgtcctgccactggtcccctttgtcacacctgtcacttcctgtgtttcacgtttactgatgtggtcttgcacttgtgcagtcccatgagggcaaggactgtgtctggctttgtcctccacgggaccccagcgccaagtccacagggagcacccaatgctgaatgaatgaatgagtgaccggcaagggaggtttattttgtcatgttgggggtcaaaggttgctgggcggaccacgtgggtgaggttgggtggggagggaagcagagatgaccccttggaagaaggggtaggaggcggsgaggtgggtgtggggtgctgtataaggatggcangtgctnccaggggtgacaagccaacctagagcaccaggcagcagaaaaaggctgacaccctcactgccccacttccacttagg

SEQ ID NO: 2017 - DNA, 2079 bp, Homo sapiens
ggggtttcactgtgttgactaggttggtctcgaactcctgacctcaagtaatccacccgtctcggcctcccaaagtgccggagttacaggcgtgagtcaccgcgcccagcctgatatgcaaatattttaaacttctatgacgttccactttatctatttgttcttctgttgcctgtgcttttggcgccatatccaagaaatcattgccaaatgcaacgtcaggaagcttttcccctgtgttttcttctaagagttttgtggttttagctcttgagtttaggtctttgatgcaagttgagttgatttttgcatgtggtgtaagggctggtccagcctcatgctctgggctcttgattcacttctcttcttttctcacgcccagctggttccgctgggtggcggggaggagtggggaagtcccgggctgggcctgcactcgatcatcccctctcaggccagccagggagtctcagctcctgcccaggacctggctggacgtgctccctaccgggaaagcctgggccgtctttctaggctgatggcagggccagcccggggcgtcctgaggcctgccctgcggacatgccccttgttctaggtggtgtggctgcccggcctgcgtgtgagaccagctgtctgtgcttcaggccatggaggctgagtgtttccagcctgtccccttgctcggctctccctctggggaagcccctgcagcccattctctgcctccgcttctgccatctgtgcctttgtctgcttcctgtttggaggtggtcatccctggggccacccctcatgatctggacacgagtctccatcctgaagccaccacccaaacccctgtgcctcaaacccctcccacccaccacatggggttccactgtgaccaactcagcagctgatgaagcttcccttggggctctcctagcaacggggagctggctttcccggaggcctggcctctccctaagtggaagtggggcgtgagggtgtcagcctttttctgctgcctggtgctctaggttggcttgtcacccctggaagcacttgccatccttatacagcaccccacacccacctccccggctcctaccccttcttccaaggggtcatctctgcttccctccccacccaacctcacccacgtggtccgcccagcaacctttgacccccaacatgacaaaataaacctcccttgccggtcactcattcattcattcagcattgggtgctccctgtggacttggcgctggggtcccgtggaggacaaagccagacacagtccttgccctcatgggactgcacaagtgcaagaccacatcagtaaacgtgaaacacaggaagtgacaggtgtgacaaaggggaccagtggcaggacagaacctggggttcgtaggaccaggtcaggagggctgcctcggggggacaccttcgggctgagcgcagaaggatgaggggagtaaaccaggctcaaacccagcaggcagaggcgatcgctgcaggcaaccgccaatgtgttcaaaggccctggggcgcggggggctgaggccggcagcacggcaggaagtaagactggggttgaaagagactgactgtcatgttgtgaaatatacacttggttttcatctccatttcctggcacacaactcctaaaatccttggaatctccaaagtgatgtctttttggatgctcatgattgacagaccagctggcagcttcaggatggttcccagggaagaccaggtagaatcacaaggttcagcaccaccccgcaacctccaggtaggggagaggggctgaaggttaagcagatcatcagcggccaatgattgaatcaatcatgccttcgtaatgaggcctccgtgaacactcagaaggatggggttccgggagcttctggatggatgagcatgtggaggctcctggagggtggagcgcctggggagcacatggaagctctgcgtccctcccccataccttgccctacacatctcttcccctgtatcctttgtaatatcctttataataaactagtaaattccatgagccccaggaacatgtgtaaaaaaaaaaaaaaa

SEQ ID NO: 2018 - DNA, 2755 bp, Homo sapiens
  misc_feature (2755)..(2755): n equals a,t,g, or c
gcttgagagcctggccaggtggctgtccacgggaggtcatagtcacagcatggaggccttgagagcctggccaggtggccctccacgtgaggtcatggtcacagcatgggggccttgagtgcctggccaggtggccctccacgtgaggtcatggtcacagcatggaggccttgagagcctggccaggtggccctccatgtgaggttgtggtcacagcatgggggccttgagagcctggccaggtggccctccacgtgaggtcatggtcacagcatggaggccttgagagcctggccaggtggccctccgtgtgaggtcatggtcacagcatagtttggagctagggagggactgtcagcctggaggtttggagactcattctggaatctagtgtgggtcaagccaacttcagggagaggctgagccagggtaggagtcacaggagcagacgaggatgtggggtgccgtgcacagagctccatgaccagcttgggaagttagaaggaaggggaggcaggaggctgcttagtctgctgccatgatgggccccatgaatggtggctctcaagcttctgtgctacacaggggtgtgtggttgggcgagtgtccttgttaattgatacctaattggccttggttgggaacatagccatgagtgcccctcgtgggtggggcgccagtctgtcattgacctcattgtgtcagcaccttccccccaaggaggctgaccctgccctgccagctgagactgggagacggagtgggctctgatcccagggcttccaggaaagctctggctttggagcagaagcgggttctaggacttagtgcccctcactcggtgcctgggttcctgtgtgtgtggaaagggtagggctgcaccctgtggaagagggttcagggagctctgaggacctggctcgtgctagatgctcagtcagtagtgtgttttagcagcagccggaagtgactgctttcagtgtgtagtggtgagtgctagctggcacccctgcgcctggcttcccagacactgtaacgcagggcaggggaggcagcgagggctgggtccccacggtggccctggcagccccgccatccccatcccctrccacgtgctgctccctccatctggtccctgcccctcagccagcggaggagcccgctgggcccttccctgcccgtccccgctcctccctggccccckcacaggtaagtgagggtgaggrgggcacaggggactggggtcactaacccccccccgggccccccccgagcccctgaggtggggaggctgggaggcgggtggggagccagcaggcactgtgctgaggaaatcctgtgggcacccgaatgggggggcctccccgctcgtggggccctcccctgccctcccgcccgcccgcctcatcaccttctcctcttgtctccatagcttccgccctgcgctgccagtctcctacctgcaggccgagctggccttcgagggcgaggccgcctgccgggccttcctagagcccctgggcctggcctacacgggcccggacaactccagcatcgactgccgcctcagcctggcgcagctgtcagccttctgagcacccagcgaggaggggcgggggcaggggctgcagcccccagcgctgcctttgcggattctgtttttgagccgtggacttgggttgtaaatttatttgtggggagtgcgctccaggaagagccaccatccctgcccccgttttcccaccggggagtctgtacagagatttttctacgtttttattttttgcctcagagggatgggattggggaggaggggatgggcagcggagggttgggggcatggtctgcaggctcatctgtgtccgcctttcactccactaatgctgtctcagtgttttctctctctctctttcgagcttgcactccggtacccgacccggcgccctggcccatcccatgccggggggccagtggaaagaagacaggccgtccagcccgtgcccgcctgcggcgggggcacccagcaagcccgcccaccgcccgctgcctcacctgcttcgccacagactcttgttcccagccccttggggcctccgtgtttggggtgggggagctgcttagagactgtgcccgtcctcggccccccaccctgaagtgccagcaccaccagcaccagatcctccgccgccacaccgcactgaggacacgccggccgggccgcctcgtctcaagttgtataaagttgtctccgtgtcccctcctccctctgcccccagtgtttcttctgatttttttttcccctttccctccctccctctccgcattcttcccttggttcagcacaggtaaaacggttcccctccctccctgccttcatggatcaccagctcacgtcatgttgccttctcttttctttgtgtgtgtgtttatttaagttatttttcttcctcctctcccttttctttttggccctccctccctccctcttctgccatgtaactggaggatgtgctatgagtttgcaaacagctggactgtcaggctgctttttttccagatgttcctcctctgcctccccttcccctcctctcccctccttttccttccttccttcctttccttggagcactgagcaccatttggaagcttgagagaaaccaaaattaaagagagaaagagagagcgtgcacgctcctgctttgtcaaaaaaaaaaaaaaaaaaaaaaaaacycggrgggggkcccggaacaaaatn

SEQ ID NO: 2019 - DNA, 647 bp, Homo sapiens
  misc_feature (521)..(521): n equals a,t,g, or c
  misc_feature (542)..(542): n equals a,t,g, or c
cgagtaggaattgaagkgaagaaagaaggatgaagaggaaattatctcttggattgctctccaggaaatccttctctatactttaaaagctcttgttcttttctaggagtccaatgtgctgattgctgctaacagtcagggtacaattaaggtgctagaattggtatgaagggttaactcaagtcaaattgtacttgatcctgctgaaatacatctgcagctgacaatgagagaagaaacagaaaatgtcatgtgatgtctctccccaaagtcatcatgggttttggatttgttttgaatatttttttctttttttcttttccctcctttatgacctttgggacattgggaatacccagccaactctccaccatcaatgtaactccatggacattgctgctcttggtggtgttatctaatttttgtgatagggaaacaaattcttttgaataaaaataaataacaaaacaataaaagtttattgagccacagttgagcttggaaagtttttgtcaaatgcngcaagagataactctttttangaagtagcatatgtgaactataatgtaacagtgaataatttgtaaagttcgtatttcccaacctctttgggaattacacatatcaatataaacaaaatataaagt

SEQ ID NO: 2020 - DNA, 856 bp, Homo sapiens
agcggccgccctttttttttttttttttccataatttgataatttattgacaatctattgaaaataattggctactgacaatatactgtggtatgtaagttcatcagctttaatgttaattgaaaccttasctgggattattgataaccttcactagtgcttcatagagctctttttcagtaactgtcttccattctagcaatatccccatgccttttgcctgtactctggtcatagtatcataatggtctccaaagagtggaattcccactacaggcacaccatgatacatagtttcaaaaatactgttcaaaccaccatggctcaggaaggctttaatctttgaatgcccaagcaggtcattttgtggtaaccattctatgagtttagtgttgtttcctagattctttggtttgggtccagaaaacctccaaatcactttttgaggcaatctccccagagctcctgccagtttgttagcaatgtcttctgacagatacttgacaccagctccaaaagacaccaagacaaagccatgttcattagcaccatttacccatctttggagatcttctggtagtgggctggctggtttggttaggattcctcctacataaacaacattaggcagagtgggtcttgggaattccagtgctacgtcagtacacagcatccacaggctggacccatgaaccaaatcatacatggacttctccggcagcaggttgtacttctgcattatcctttcatatttgggaagaaccagaaagctgacccctaatctggaaatgaggtaaacaccggttttttcatcctttgcagcaagttcatgcggtctgtgaggagtgagttaaac

SEQ ID NO: 2021 - DNA, 806 bp, Homo sapiens
  misc_feature (445)..(445): n equals a,t,g, or c
gtgaaaaagagctctatgaagcactagtgaaggttatcaataatcccagctaccgtcagagggctcagaagctttcggaaattcacaaggatcaacctggtcaccctgtcaatcgaactatctattggatagattatattattcgtcacaatggagcccatcacctacgtgccgctgtccatcagatctccttttgtcagtattttttactggatattgcctttgtgcttttgcttggtgctgccttgttatactttctcttgtcttgggtgacaaaatttatctacagaaaaatcaaaagtctgtggtctagaaataagcatagcacagttaatggacattaccacaatggaatcctcaatggsaagtacaaaagaaatggccatattaaacatgaaaagaaagtgaaatgagccaacagcccaggtgatagaaataaattggntcactcattgaatttytattgctattatttastctaacagctactaaaagtaaaacatcagtaaacaattctaacatgcccttatgagatctactaatgaaattctgtggaattaagatggctgtaaaaagcacaaacctaaaatgcagaaatgtattttattcaaatactgatgtagagagttttggcactgaaccttttagaagccttaattatttaaatcaattcagtgactgtgtcagaccttagttttaaatcttgatatgtgcgtgtcccggatcaggaatggtttcatttttcttaataatgtgtgtgtgtgtatgtgtgtgtgtgtgtgtgtgtgtttgtgtgtgtgtgtgtg

SEQ ID NO: 2022 - DNA, 1553 bp, Homo sapiens
tgagggtacaacacactcaagaataaagtaaaaggatagtcaggatccagatgtttcttttctagcatttaatgtgtgtgaactcagaacactaccatgaaagaacacttccccccaaaactggatgcagaggaagaaaaaaaaaaaagaaatggcacagttttttgtattttttttttttagttattttttgttgttgttgtttgtattgtttttcttttctgatagagtatggccacttctgggggaaaaacatgtaattaagtaaatgtatacattggttttcacgttttacttttgttttcccactaccaataattttcctctggaagaattttatagttttttctatttcattttaatgagtaacaatatgttaaatgcataattaagacaaagcaatgaaattctgactttattcaaagtactgaagattattgcttctagggcatttttaaacagcaccattgtattgttgaatgtttatgtaactgatggcttttctataatgtaatttttgaatgttcaggtgttacatttccaaagtttaacttttaaaaaaccatcttctgatcccttttattgtctgggccatacaatctatattacataggtgccaacatttaattcttttaaatggaacatttgcagttttccatattggtacctgctttttctggagaggtttgagatcttgttaacaaatcagactttacactatatacagatgtgacagataaattgaaccacttgtttgtgaaaatgagttcctgtcatcttcctcattcactcagccctcaccccagcagccttttccggtcattgtagctgacatggagcagtgacagtattcatttgagaacagggatgcaagtcacagacatcataaaatcagggtctccctgctgaagcattcactagttggcaactatgaatttattccatgtcattctgtttacttagcacttgcactacccttgttggttgagtgtatgctttatttgtttctagtttgaaatcccacatctgatagctgagagtaggcaaatacaacatttacctaatgtcattcactaactggaagagttgtgaaaattctagagtgctgtaaatccttggcatacactatgacaaacaacttcattactctcccaccaggagctgctctyctgcacttagaaataatgtcacaagtagttttctaatgtacaatgcagacaaatgtactgctctctgaatacttgaagaaatggtattatacatacatagaaacttattagttataccttttcacaatcttattacgatgttgccgttaaaagggaaaaaagacacaggcaatgaatggtgggatagtaagaggacttagagtgtatgaatgagttgattttacttttttggaatttgattaagttgacagtaggcactgattggatgattaaacataagttaatctccactgtgataaaaacttaaataataaacatgatttaaaataaaaaaaaaaaaaaaaaactcgagggggggcccgyacccaatcgccytatgagtat

SEQ ID NO: 2023 - DNA, 2373 bp, Homo sapiens
ggcacgagtgaaaaagagctctatgaagcactagtgaaggttatcaataatcccagctaccgtcagagggctcagaagctttcggaaattcacaaggatcaacctggtcaccctgtcaatcgaactatctattggatagattatattattcgtcacaatggagcccatcacctacgtgccgctgtccatcagatctccttttgtcagtattttttactggatattgcctttgtgcttttgcttggtgctgccttgttatactttctcttgtcttgggtgacaaaatttatctacagaaaaatcaaaagtctgtggtctagaaataagcatagcacagttaatggacattaccacaatggaatcctcaatggcaagtacaaaagaaatggccatattaaacatgaaaagaaagtgaaatgagccaacagcccaggtgatagaaataaattggttcactcattgaatttttattgctattatttagtctaacagctactaaaagtaaaacatcagtaaacaattctaacatgcccttatgagatctactaatgaaattctgtggaattaagatggctgtaaaaagcacaaacctaaaatgcagaaatgtattttattcaaatactgatgtagagagttttggcactgaaccttttagaagccttaattatttaaatcaattcagtgactgtgtcagaccttagttttaaatcttgatatgtgcgtgtcccggatcaggaatggtttcatttttcttaataatgtgtgtgtgtgtatgtgtgtgtgtgtgtgtgtgtgtttgtgtgtgtgtgtgtgtgtcctaattaagagaatttttactggctgcttgttacatttgttgagggtacaacacactcaagaataaagtaaaaggatagtcaggatccagatgtttcttttctagcatttaatgtgtgtgaactcagaacactaccatgaaagaacacttccccccaaaactggatgcagaggaagaaaaaaaaaaaagaaatggcacagttttttgtattttttttttttagttattttttgttgttgttgtttgtattgtttttcttttctgatagagtatggccacttctgggggaaaaacatgtaattaagtaaatgtatacattggttttcacgttttacttttgttttcccactaccaataattttcctctggaagaattttatagttttttctatttcattttaatgagtaacaatatgttaaatgcataattaagacaaagcaatgaaattctgactttattcaaagtactgaagattattgcttctagggcatttttaaacagcaccattgtattgttgaatgtttatgtaactgatggcttttctataatgtaatttttgaatgttcaggtgttacatttccaaagtttaacttttaaaaaaccatcttctgatcccttttattgtctgggccatacaatctatattacataggtgccaacatttaattcttttaaatggaacatttgcagttttccatattggtacctgctttttctggagaggtttgagatcttgttaacaaatcagactttacactatatacagatgtgacagataaattgaaccacttgtttgtgaaaatgagttcctgtcatcttcctcattcactcagccctcaccccagcagccttttccggtcattgtagctgacatggagcagtgacagtattcatttgagaacagggatgcaagtcacagacatcataaaatcagggtctccctgctgaagcattcactagttggcaactatgaatttattccatgtcattctgtttacttagcacttgcactacccttgttggttgagtgtatgctttatttgtttctagtttgaaatcccacatctgatagctgagagtaggcaaatacaacatttacctaatgtcattcactaacatggaagagttgtgaaaattctagagtgctgtaaatccttggcatacactatgacaaacaacttcattactctcccaccaggagctgctctcctgcacttagaaataatgtcacaagtagttttctaatgtacaatgcagacaaatgtactgctctctgaatacttgaagaaatggtattatacatacatagaaacttattagttataccttttcacaatcttattacgatgttgccgttaaaagggaaaaaagacacaggcaatgaatggtgggatagtaagaggacttagagtgtatgaatgagttgattttacttttttggaatttgattaagttgacagtaggcactgattggatgattaaacataagttaatctccactgtgataaaaacttaaataataaacatgatttaaaataaaaaaaaaaaaaaaaaa

SEQ ID NO: 2024 - DNA, 1607 bp, Homo sapiens
atgcaagcatgggaagctgggcccagccttggcaactggtaaacgtggttgtgaatgaaggtagctgagcagacacctgttgactcacacggcttttgctgatgacacggggctccagtacacagtctgataaggacttaacgtcctaacctcaattgtattaaatagcattggggaatagctaaacctttttaaaaaaatttattggattttcctccctgcttaaaagatttcaccagaaaaccttcatataaaaattcaggccctttttggacaatttttaaaatttgtatctttactagaacatgagaatctttttcccttggaagcttgaattataaatgtggtgtttggcctgcctcagcagcaccagttgactgctcgtgtgccagcggtgtggggaggacggggcaggacgctgcagctctctccagccctgttggcatcctcagtgcctgcaggcctctcgctgcctgttgggctgtctggggggtggccatttagggatcgtggggacggggtccaccccaagaagaaagaaaggcccgtccacaggcccggctctgggccacgtgccccggaagcaggtgtgtccagagtcagctgagggctctccccacaccacccagcaggcgctggtgctccttctgcctcatgggaccagtccagcttccagccgctctggctcgagggtggtctgagcacttccttctgagtgggcttctctgggagctctccagtggcactgctggacctgcccacgtttctgtaaaatcaggatacgtggctttagtaagcagaccaagcgcttcgtggcagggaaagcagcgtgcggggaagtcactgaaaagtgctgcctaaggaagtttggaaatagtccccgttccagattgccttgaattttaaaacattttgctttgggaaagtaggtcagcagcacctaagatcaaggatgcgttccattttcacacttcacagtcatgaaaactgagaagactgtcttcagcgtgaactaaagttcacaggcagatcactgatccagaacacttcaagaactcgtcaaacagctcgataagcctttttgactgtgtacatctgtaccgggaataacattcctaggctgaaatttccacaaagaatagaacctgtacccagttcttcaggctgatttccctgacctcttgggcatttgtatttgtagtaaagtattgcagagattcctaagtattttatagcagccatcaaaattggactttgtattgtttattcataaaagacacttggtaatagacttcagtgaactctgtatgaatgcagtagtgtgygtgcaaaatccgcttcctgagcgtagggtgctgagctggcgctagggctcggttgtgaaatacagcgtagtcagcccttgcgctcagtgtagaaacccacgtctgtaaggtcggtcttcgtccatctgcttttttctgaaatacactaagagcagccacaaaactgtaacctcaaggaaaccataaagcttggagtgccttaatttttaaccagtttccaataaaacggtttactacctgaaaaaaaaaaaaaaaaaaaaaaaaaaaaaaaaaaaaaaaagg

SEQ ID NO: 2025 - DNA, 2620 bp, Homo sapiens
tagaggatccaagcttacgtacgcgtccggagaccgctygagctggagtcggagttgtaacgctccactgactgatagagcgaccggccgaccatggcgcccggagtggcccgcgggccgacgccgtactggaggttgcgcctcggtggcgccgcgctgctcctgctgctcatcccggtggccgccgcgcaggagcctcccggagctgcttgttctcagaacacaaacaaaacctgtgaagagtgcctgaagaacgtctcctgtctttggtgcaacactaacaaggcttgtctggactacccagttacaagcgtcttgccaccggcttccctttgtaaattgagctctgcacgctggggagtttgttgggtgaactttgaggcgctgatcatcaccatgtcggtagtcgggggaaccctcctcctgggcattgccatctgctgctgctgctgctgcaggaggaagaggagccggaagccggacaggagtgaggagaaggccatgcgtgagcgggaggagaggcggatacggcaggaggaacggagagcagagatgaagacaagacatgatgaaatcagaaaaaaatatggcctgtttaaagaagaaaacccgtatgctagatttgaaaacaactaaagcgctccagcacatcagtcccgacgcttcctgtgaggtgcacrctccgcagcccagcccagccgggagaccacgtggccattgcggtctcctgaccttggccagtgaacctgccagccttccaggacaggcggccggagagctgcccctgaaggacagtcctctcgtcttgcagactggtgaccttctattccctgttcatctctgtttctagatttagtcacttgaaataagaaatctttggggtttgggcttttttatactcttctcagtttgtgaaacgctaactgcacacgaagccgcctgacggcacccagcgctgtggctgtcattctcccagggcagaaccctgcgtttctctctgtccactaacaagcttcacacgcaacacagggaagtcggtttgacttttgtcatgaggagaactgaccagccctcatcattccccataaaaccacggacagcgtctgtgtgcgcatcttgagtcttcacacctgttgactcacacggcttttgctgatgacacggggctccagtacacagtctgataaggacttaacgtcctaacctcaattgtattaaatagcattggggaatagctaaacctttttaaaaaaatttattggattttcctccctgcttaaaagatttcaccagaaaaccttcatataaaaattcaggccctttttggacaatttttaaaatttgtatctttactagaacatgagaatctttttcccttggaagcttgaattataaatgtggtgtttggcctgcctcagcagcaccagttgactgctcgtgtgccagcggtgtggggaggacggggcaggacgctgcagctctctccagccctgttggcatcctcagtgcctgcaggcctctcgctgcctgttgggctgtctggggggtggccatttagggatcgtggggacggggtccaccccaagaagaaagaaaggcccgtccacaggcccggctctgggccacgtgccccggaagcaggtgtgtccagagtcagctgagggctctycccacaccacccagcargcgctggtgctccttctgcctcatgggaccagtccagcttycagccgctctggctcgagggtggtctgascacttycttctgagtgggcttctctgggarctctycagtggcactgstggacctgcccacgtttctgtaaaatcaggatacgtggctttagtaagcagaccaagcgcttcgtggcagggaaagcagcgtgcggggaagtcactgaaaagtgctgcctaaggaagtttggaaatagtccccgttccagattgccttgaattttaaaacattwtgctttgggaaagtaggtcagcagcacctaagatcaaggatgcgttccattttcacacttcacagtcatgaaaactgagaagactgtcttcagcgtgaactaaagttcacaggcagatcactgatccagaacacttcaagaactcgccaaacagctcgataagcctttttgactgtgtacatctgtaccgggaataacattcctaggctgaaatttccacaaagaatagaacctgtacccagttcttcaggctgatttccctgacctcttgggcatttgtatttgtagtaaagtattgcagagattcctaagtattttatagcagccatcaaaattggactttgtattgtttatycataaaagacacttggtaatagacttcagtgaactctgtatgaatgcagtagtgtgtgtgcaaaatccgcttcctgagcgtarggtgctgagctggcgctagggctcggttgtgaaatacagcgtagtcagcccttgcgctcagtgtagaaacccacgtctgtaaggtcggtcttcgtccatctgcttttttctgaaatacactaagagcagccacaaaactgtaacctcaaggaaaccataaagcttggagtgccttaatttttaaccagtttccaataaaacggtttactacctga

SEQ ID NO: 2026 - DNA, 383 bp, Homo sapiens
  misc_feature (4)..(4): n equals a,t,g, or c
  misc_feature (7)..(7): n equals a,t,g, or c
aaanggncccgtgctgattgctcacttcctgggtgtggaccactgtggccacattcatggccctcaccaccctgaaatggscaagaaacttagccagatggaccaggtgatccagggacttgtggagcgtctggagaatgacacactgctggtagtggctggggaccatgggatgaccacaaatggagaccatggaggggacagtgagctggaggtctcagctgctctctttctgtatagccccacagcagtcttccccagcaccccaccagaggagccagaggtgattcctcaagttagccttgtgcccactgctcctgctctggcctttcctgtgtgagagtcaagggctgcggaagagaccaaggcccaaggcccccccc

SEQ ID NO: 2027 - DNA, 1104 bp, Homo sapiens
  misc_feature (26)..(26): n equals a,t,g, or c
  misc_feature (28)..(28): n equals a,t,g, or c
  misc_feature (1068)..(1068): n equals a,t,g, or c
aggtcttccaaagttccaagtacagntntccagtcacgcgttgtaaacgcggccagtgctagcttataatcgactcactatagggcagcasascyatgcccgtcgcatgcmcgcgtaacttgggcccctcgagggatcctctagagcggccgccctttttttttttttttctttttttctttttaaagacagggtctcactctgtcactcaggctggagtgcagtggcacggtcatggctcacagcagccttgaccttccaggctctaaggatcctcctgctttagcctcccaagtagccagcaagtacggccatgccctaagccaaaatttaagattaactttgagcttgtaccagatatcaagatgtaatggaattcttagaattcggtggaatcaacaacactgattgcacattttttccttcggctactccaaatcccctcttccctatcatttctcctcccttctcagcacccagaaaaagcaccccatgcactgtacaaatactgcaaacactatagttgcattcataggaccattaaaaaaaaagagccaaattacaaaacaatctatattttacaaacatttcagttgggttcttaagctaaagatattactgtttactttggtacgataactagaaaacacaaacattatgctccagaaaaacataatgtggtttwagctgtaaataactcaaatgaacagttactttaggctagtataccatgcacccctataataaacatgtaaccacctaactagaaagggagggtcaactcatgaatgggttgcgttctaaatttccaaaacttcatttataaattgaatataaggttgattttgaaactcaagatgcctttactcataaaaccaaacatataaacagttgtactaaatccatagtccaaaagaactttagtgtacaaatctatcatagcactcttctgtttaagcttgtatctatgtcaaactacaagtttcttattcatttctgtatcctagaatccagcatgacacagtgtaggattttggcaagtatttgctgttgtgaagtattgaatantaattactcgggtgcgggccccaactgggttttttt

SEQ ID NO: 2028 - DNA, 576 bp, Homo sapiens
aagtgctgctattacagacatgagccactgtattggactagtttatgtatggaatatggagggcccccagacctgcggcctctctgcacttgcggttcgagagggcagggtgtatagcaggactgccccctcctcccagtggccctgactggtggcggtgactgctgaggtcagcccaggtccacacgcacctccagggtctgcagtgtgaagcaggttgcagaaacgtgggtacctcggggcagttaccagaaaaggggctggagattaggaggaagccagccagtttagcagtcaccagtttagaagaggagacttaaccactttttaaattcaagaccccaccttctctaaacagcatagaaaaagctttctgaattatgatattaaacagatgtcttatgacgtttgcccgtttgtcttatgctgtttgttaatggtaaaaaaaaaaaaaaaaaagcatcactgaaacactttattttaatggcatactttaatttccagccattaggaggagacatcagaattaaagattgttgagcatcctaagtgcttttgatagttatcaaagggaca

SEQ ID NO: 2029 - DNA, 1889 bp, Homo sapiens
  misc_feature (58)..(58): n equals a,t,g, or c
  misc_feature (1849)..(1849): n equals a,t,g, or c
cagctcgaaatggaactccctaggtgacaytakagaaggtacgcctgcaggtaccggnccggaattcccgggtcgacccacgcktcygccggagtgagcgcgaccatcatgtccatgctcgtggtctttctcttgctgtggggtgtcacctggggcccagtgacagaagcagccatattttatgagacgcagcccagcctgtgggcagagtccgaatcactgctgaaacccttggccaatgtgacgctgacgtgccaggcccgcctggagactccagacttccagctgttcaagaatggggtggcccaggagcctgtgcaccttgactcacctgccatcaagcaccagttcctgctgacgggtgacacccagggccgctaccgctgccgctcgggcttgtccacaggatggacccagctgagcaagctcctggagctgacagggccaaagtccttgcctgctccctggctctcgatggcgccagtgtcctggatcacccccggcctgaaaacaacagcagtgtgccgaggtgtgctgcggggtgtgacttttctgctgaggcgggagggcgaccatgagtttctggaggtgcctgaggcccaggaggatgtggaggccacctttccagtccatcagcctggcaactacagctgcagctaccggaccgatggggaaggcgccctctctgagcccagcgctactgtgaccattgaggagctcgctgcaccaccaccgcctgtgctgatgcaccatggagagtcctcccaggtcctgcaccctggcaacaaggtgaccctcacctgcgtggctcccctgagtggagtggacttccagctacggcgcggggagaaagagctgctggtacccaggagcagcaccagcccagatcgcatcttctttcacctgaacgcggtggccctgggggatggaggtcactacacctgccgctaccggctgcatgacaaccaaaacggctggtccggggacagcgcgccggtcgagctgattctgagcgatgagacgctgcccgcgccggagttctccccggagccggagtccggcagggccttgcggctgcggtgcctggcgcccctggagggcgcgcgcttcgccctggtgcgcgaggacaggggcgggcgccgcgtgcaccgtttccagagccccgctgggaccgaggcgctcttcgagctgcacaacatttccgtggctgactccgccaactacagctgcgtctacgtggacctgaagccgcctttcgggggctccgcgcccagcgagcgcttggagctgcacgtggacggaccccctcccaggcctcagctccgggcgacgtggagtggggcggtcctggcgggccgagatgccgtcctgcgctgcgagggacccatccccgacgtcaccttcgagctgctgcgcgagggcgagacgaaggccgtgaagacggtccgcacccccggggccgcggcgaacctcgagctgatcttcgtggggccccagcacgccggcaactacaggtgccgctaccgctcctgggtgccccacaccttcgaatcggagctcagcgaccctgtggagctcctggtggcagaaagctgatgcagccgcgggcccagggtgctgttggtgtcctcagaagtgccggggattctggactggctccctcccctcctgttgcagcacaaggccggggtctctggggggctggagaagcctccctcattcctcccaggaattaataaatgtgaagagagctctgtttaaaaaaaaaaaaaaagggcggccgctctagaggatccctcaggggcccaagcttacgcgtgcatgcgamgtcataactctctcctatagngagcggattataagscttaacgatgccgcgtttcaacgtg

SEQ ID NO: 2030 - DNA, 2829 bp, Homo sapiens
  misc_feature (2800)..(2800): n equals a,t,g, or c
  misc_feature (2820)..(2820): n equals a,t,g, or c
  misc_feature (2823)..(2823): n equals a,t,g, or c
  misc_feature (2829)..(2829): n equals a,t,g, or c
cacttgtgtagggtttaatttctaaattgtwggcatgttctttttctcaggctattcagaagtaacaacatttttcatttcagacatgcaatcacctattaatgatgaaatattttaccactttgggaatatttaattagtttagtcatggagaatacttcccacattttaagatttttcaaatatcactgtcatttctattttagcattttatcaaattattgcttttttattttataataaggcttaagacagattatagacctccttaagagatgagtttcttcttctaaaaatgcatgttgatagaggactatttaggctaatcggaggaatcattaagaaagaaagttttaacactgtttatccctatctgctttccttgcactttttctgtgaaaaatattttctgtttgcaaaatcttccctgagttctgaacccagcaccatcagtaccaaagtcttatgcaatatgtatttattatgctcctgaaataggcctcttcttgatgagacccaaactattacaaaaatatcagtattcatattttactcacaattcatacccgtgcttacttagttggcattttagtgcttygaatttctatcttaaagcacagaaaaaaaaaggtaatttaatccaagtattctatcatcaaaattattgtctgattatatgaagataaatgactggcgactctggttgtgtgtgtatgtgttttgcttttactttaattcttgcaatccaaatatagaattatatatttatctattattgcctttattctttaagcacttgagtttaatgattattcttacctgagaaaggaagaaatttaattctaccagtgatgaatacttgaaattaattgaactcataccaaaagatgtaatccagtttctcagtttgaaggagaacgtttgactcactttcattgttcatgctagctgaatataatcaagacttttgatttgatttgcttttattattcaatgcagatagagcctgataagttttagaacatttaaagaagattgaaatctcagtcagtaactaaatgataaaatgagattgattggcttatactaggtacatttatttttgaaagaattaatgtaaaataatagttatttttaaagcagctaatattacactgataatttgttgctaaatttagtgctgtccacatcataggtgcttaaatatgtactggttaactagaggggggtaggaaagcaagcggttttatcttgttcttacctttttgcaggaaaagtggctttaaaaaaatttatataataaaactattttggaaattcattcttttagaaagagaccttgagataaatattttttgactctggatatttctatagttctgaacacagattttaaacccactatcaaaatgaaaacaatataaagctatattagtgagtctccatgtagcagtttgtttttatagttactgtttcatgcttaaaacttcattcttactttcattaatgttacccttcactggtatagccactcactaaataagtatatttaaaacatcaaaattttgaactaaagtttgtgattctcttattcagcaatccttatcttatgctggctgcatgagttaattcaacatccagattaaatatcctgaagtaggttctatatatttcctcatacaacagacatggaatggaaatgccactagaaactgccctgctacttttaagtctgacctttgcaggaggtacactttgctgttctatgattgtattcacctacctaaaatacaaatgaagacagaacatatcatttactgcacgatgaatttttcatttattaaatgaaaaagtttgctagacattttaaatattaagtattttgactacacggattaatttaaatgattctatcaggcattctgatatttaacaactctattaaaatatttatagaaaaataaaagcaaattgatataaatttttgagcaattctatttttgtagaaaaaagataacctgtaattataaagatgttttttgaatgtgtagtatcctagaaaataaaagttcttgtgaaacttaaaaaatgaatgaaaaccaactaatagcatgcaagatcatagatcctgcattaaatttttatttgtgaaaatttgaaaattatgagctataacttataaagtttgccttcttatgtctaaaatcttttaaaggattatttgcatttatgtaaaactggaaatgaagttatatatgagtgcaaagaaattgacttctgctcaaatatgtgttgataccctacagtaaattgaattaaatttttatcccaactgtttgattttattatttcatggactagccttacgttaagtgaaatactatttatgttgttaccacccctaagagtgactctgatatattatggatgacccaggacggtcttaaaggtctagttttaaaaactgcctagtttgtaagtatttgaatccagttcttttctaaattttaataatttgactcaaaatttttgctacagggtcaacttttaaattgtatatttcctctgaggcacactgggcatttggagaatggttcttcactggtgtagagagccaggtttactgttggttgcaccatctgttatcaggcatgcagaaacatttttcttctggagaaacagaggggaaggtgttgttacagtgtacatgtttcctctgtgtcgtttttaagggaaataaacatgttccaaaagatgctgttaaaataaatatttgaacacgtaaaaaaaaaaaaaaaanaaaaaaaaaaaagaaaaagnggnggaagn

SEQ ID NO: 2031 - DNA, 446 bp, Homo sapiens
  misc_feature (424)..(424): n equals a,t,g, or c
ctgcccggccgccaccccctctgggaaagtgcggagygtctctgcctggccgcccattgtctgggatgtgaggagcccctctgcccggctgcccagtctgggaagtgaggagcgcctcttccyggccgccatcccatctaggaagtraggagygtctctgcccggctgcccatyrtctgagatgtggggagcrcctcwgcccsgccgcgaccccgtctgggatrtgaggagcscctcygccggcmgccgccccatctgagaagtgaggagcccctccacccagcagccgccccatctgagaagtgaggagcccctccgccggcagccgcccatctgagaagtgaggagcccctycacccggcagccgscccgtctgagaagtgaggcgcccctytgcccggcagccaccccgtccgggagggangtgggggggcagccccgcccgg

SEQ ID NO: 2032 - DNA, 1437 bp, Homo sapiens
  misc_feature (443)..(443): n equals a,t,g, or c
  misc_feature (1392)..(1392): n equals a,t,g, or c
  misc_feature (1406)..(1406): n equals a,t,g, or c
  misc_feature (1423)..(1423): n equals a,t,g, or c
ggtaattgcgctggctaaagaacaaagaattctatagcactgtgagctggagaatgttgtagcaggttaataaggggcttactccattttgtcagtaaccagcattggttccaggaattcaagaggtggtgagatattatgcttaatggtaataagataccacttattggtaatgtaccaggcattggtctctggcatcttaccatctttgtactcatatcttcacaggagcacaagaaaattaaaccatccaccttttacagatttagggatttagtagaaggctgaaggwggccagataactgaacttttacttgtacagctaatattaagtcggtgcaatattaattgcggtttttgcaatacttttaaagtttcagaaccctggatttgaagcagagcgtctgggagtctcttcgttctgttataccagagttgttctngtatgtgmatmaggwkcgtawctgaatgccttggcttcagccctggaarccattgcattctgaccaacctttgtgtaaccattttgtagactgtgaggactcttgtcactccttaaattctctcctaaacatattatwttttgcttctgaagatgatccaaataccctcaaaactcaggtggagatactgttaaaagatagttttcaaaaagggtaagatcataactcattttaaatataaaatgaacacatgttaaaaattttaactcataagacaagcagttacaaccagttcagggagagtaggacaacaaagagcagacatacatgtagtaatgtcagtaatgtcgaaatgaacacaactggcttttccacagggaaggattatcaagacagttcatttacttatccatggacaagagtgatttgcatttccctcagttctacacaacttagagttgctgaagggcagtgaaaggctagaatcatataacctagaaggatgtgttccaaagcttagagtataaatctaaatattgcagtttcccattggaaacatcccatggtcttttttaaaatttgtttacagaatgtgagagtttataatactattgtctcgtttttttttcttccataacatatttaaaattcttgcttaaaaatgtttttgatggggatagggggttgtgaattaaattcctaacatgtcctaatagttacatgttatgcctaatctgttagtgtacttgggtgatatgacacttattttaagcctgatgcacttagaagcatgttctactttggatatctgttctgaggatggtagctacaaaatgaacttgtgccctttcgcaaattgttggacttgtggtggttgtcttgtgtccctagtatctgatttggaagactcaattaagggtttaaaagcctgcagaaggcgcgggcccgncacgcctaactggntttcatatttttttggnggagacggggtttc

SEQ ID NO: 2033 - DNA, 584 bp, Homo sapiens
ctctgcccggccgccccktctgggargtgaggagcccctctgcccggccaccaccccgtctgggaggtgtacccaacagctcattgagaacgggccatgatgacgatggcggttttgcagaatagaaaagggggaaaggtggggaaaagatagcgaaatcagattgttgctgtgtctgtgtagaaagaagtagacatcactttgttctgtactaagaaaaattcttctgccttgggatgctgttgatctatgaccttacctccaaccatgtgctctctgaaacatgtgctgtgtccactcagggttaaatggattaagggcggtgcaagatgtgctttgttaaacagatgcttgaaggcagcatgctccttaagagtcatcaccaytccctaatctcaagtacccagggacacaaacactgcggaaggccgcagggtcctctgcctaggaaaaccggagacctttgttcacttgtttatgtgctgaccttccctgcactattgtcctatgaccctgccaaatccccttctgcgagaaacacccaagaatgatcaattaaaaaaaaaaaaaaaaagggcgkccgc

SEQ ID NO: 2034 - DNA, 2237 bp, Homo sapiens; identical to SEQ ID NO: 1480

SEQ ID NO: 2035 - DNA, 728 bp, Homo sapiens
gctccaagaaggggaaaaaaatgaagattttgatacttggtatttttctgtttttatgtagtaccccagcctgggcgaaagaaaagcattattacattggaattattgaaacgacttgggattatgcctctgaccatggggaaaagaaacttatttctgttgacacggaacattccaatatctatcttcaaaatggcccagatagaattgggagactatataagaaggccctttatcttcagtacacagatgaaacctttaggacaactatagaaaaaccggtctggcttgggtttttaggccctattatcaaagctgaaactggagataaagtttatgtacacttaaaaaaccttgcctctaggccctacacctttcattcacatggaataacttactataaggaacatgagggggccatctaccctgataacaccacagattttcaaagagcagatgacaaagtatatccaggagagcagtatacatacatgttgcttgccactgaagaacaaagtcctggggaaggagatggcaattgtgtgactaggatttaccattcccacattgatgctccaaaagatattgcctcaggactcatcggacctttaataatctgtaaaaaagattctctagataaagaaaaagaaaaacatattsacckagaatggactgtccccaaagaagtaggacccactaatgcagatcctgtgtgtctagctaagatg

SEQ ID NO: 2036 - DNA, 566 bp, Homo sapiens; identical to SEQ ID NO: 470

SEQ ID NO: 2037 - DNA, 451 bp, Homo sapiens; identical to SEQ ID NO: 1729
  misc_feature (441)..(443): n equals a,t,g, or c
  misc_feature (445)..(445): n equals a,t,g, or c

SEQ ID NO: 2038 - DNA, 1729 bp, Homo sapiens
  misc_feature (3)..(3): n equals a,t,g, or c
  misc_feature (13)..(13): n equals a,t,g, or c
  misc_feature (47)..(47): n equals a,t,g, or c
  misc_feature (1704)..(1704): n equals a,t,g, or c
  misc_feature (1717)..(1717): n equals a,t,g, or c
  misc_feature (1724)..(1724): n equals a,t,g, or c
  misc_feature (1726)..(1726): n equals a,t,g, or c
ggntcggaatctnaggtcgaccacgcgtcgggcgctccgagcgcgknccctgggttcgaacacggcacccgcactgcgcgtcatggtgcaggcctggtatatggacgacgccccgggcgacccgcggcaaccccaccgccccgaccccggccgcccagtgggcctggagcagctgcggcggctcggggtgctctactggaagctggatgctgacaaatatgagaatgatccagaattagaaaagatccgaagagagaggaactactcctggatggacatcataaccatatgcaaagataaactaccaaattatgaagaaaagattaagatgttctacgaggagcatttgcacttggacgatgagatccgctacatcctggatggcagtgggtacttcgaygtgagggacaaggaggaccagtggatccggatcttcatggagaagggagacatggtgacgctccccgcggggatctatcaccgcttcacggtggacgagaagaactacacgaaggccatgcggctgtttgtgggagaaccggtgtggacagcgtacaaccggcccgctgaccattttgaagcccgcgggcagtacgtgaaatttctggcacagaccgcctagcagtgctgcctgggaactaacacgtgcctcgtaaaggtccccaatgtaatgactgagcagaaaatcaatcactttctctttgcttttagaggatagccttgaggctagattatctttcctttgtaagattatttgatcagaatattttgtaatgaaaggatctagaaagcaacttggaagtgtaaagagtcaccttcattttctgtaactcaatcaagactggtgggtccatggccctgtgttagttcatgcattcagttgagtcccaaatgaaagtttcatctcccgaaatgcagttccttagatgcccatctggacgtgatgccgcgcctgccgtgtaagaaggtgcaatcctagataacacagctagccagatagaagacacttttttctccaaaatgatgccttggggtggggagtggtagggggaagagctcccaccctaaggggcacacactgagttgcttatgccacttccttgttcaaaataaagtaactgccttaatcttatactcatggcttggagttaccttatattcaggtatatgtgatattttgcctggtttgttaaaattgccccatttagattccttctataattgttcttatagataagtaatttatatatgagctgtgttagtattttttcagtgtgagatctctggattctttcacaataaagctgttgaattttaacaggagtattagtacataaattttctactcaacaattccgagataggattatgcctagtttgtcatatcacagaaaaactccaagttaacttcatgttttggaagggcaggtcgtttttaaagtatttctttttttaactggatgaaaaatcttcatgttaggattaattttcttaatcacctccacactgtacagaggaaactcaagccttaaatgtttaagtaaactctgtctcagttttaggattaaaatacccaccggtggtgtgatgatgccatataccgcagggcttgcttctgtcaagtgtgactctatctcagtaattaaaataagtgctgatctactgattttttttaatgggattcatttctaaatgggcattatnaatagagcttggncattttnanaac

SEQ ID NO: 2039 - DNA, 644 bp, Homo sapiens
  misc_feature (319)..(319): n equals a,t,g, or c
gcacaactggaacccatctccaggaacaaacagctggaacccatctcccgttgaagggaaactgccagatttttgagcctgtgttggaagagatggtgatgggcctgggcgttttgttgttggtcttcgtgctgggtctgggtctgaccccaccgaccctggctcaggataactccaggtacacacacttcctgacccagcactatgatgccaaaccacagggccgggatgacagatactgtgaaagcatcatgaggagacggggcctgacctcaccctgcaaagacatcaacacatttattcatggcaacaagcgcanatcaaggccatctgtgaaaacaagaatggaaaccctcacagagaaaacctaagaataagcaagtcttctttccaggtcaccacttgcaagctacatggaggttccccctggcctccatgccagtaccgagccacagcggggttcagaaacgttgttgttgcttgtgaaaatggsttacctgtccacttggatcagtcaattttccgtcgtccgtaaccagcgggcccctggtcaaktgtggctctgctgtcctgcttccatttcccctctgcacccagaacagtggtggcaacattcattggcaaggggcccaaagaaagagcta

SEQ ID NO: 2040 - DNA, 671 bp, Homo sapiens
ccacgcgtccgcacactaaagaaatgagagatgcagaattctaaggctaaatagctaggaagtattcattcaaacttgaatattcttcaaagagagtgtgggggcaactctaatcagaggaagaaactaaaggaagtaaaaccagatgttttccaccaaagccctccttttggctggtctgatttctaccgcactggcagggccatgggctaatatatgtgctggcaagtcttccaatgagatccggacgtgtgaccgccatggctgtggacagtactctgctcaaagaagtcagaggcctcaccagggtgtggacgtcttgtgctctgctggatctactgtgtacgcaccattcactggaatgattgtgggccaggagaaaccttatcaaaacaagaatgctatcaataatggtgttcgaatatctggaagaggtttttgtgtcaaaatgttctacattaagccaattaagtataaaggtcctattaagaagggagaaaaacttggaactctattgcccttgcagaaagtttatcctggcatacaatcgcatgtgcacattgaaaactgtgactcgagtgaccctactgcatacctgtaaatcgaaggccaatggtcagatcttcaaaataaaaagtcatcttaaaaacctggaaaaaaaaaaaaaaaaa

SEQ ID NO: 2041 - DNA, 2228 bp, Homo sapiens
  misc_feature (2118)..(2118): n equals a,t,g, or c
  misc_feature (2173)..(2173): n equals a,t,g, or c
  misc_feature (2176)..(2176): n equals a,t,g, or c
  misc_feature (2211)..(2211): n equals a,t,g, or c
  misc_feature (2216)..(2216): n equals a,t,g, or c
  misc_feature (2226)..(2226): n equals a,t,g, or c
agtcgacgaaaaaggccccctgacgaaacgagacgaggggggcccgtctggtgggcagcagtaggagcacccccacctggagatgaagcctcctctgtaggggcagggcaaccagctgcgtccagaatctccagcctcagcctaagcccagcagtggaggccggcgacgagggggccagcgccacaaggtgaagtcccagggggcctgtgtgactcctgccagcggctgctgaaccttcccctggcccaccctcaccacccaaggggtcatcatctctggccaccactccaccagatgggcagagcagctatgaccgccacccagccctcccgctcaggccacagccggagcctccgcattgcccccacccccattttccaggggggttgtaatttataagctgacgaaggtagccagacttccggaggactgaccatctctcactgtcctccccaccttcttcctcactcacacattttttgtacatctgggcccttagtttttattctgtttattatatgtctctgtctctctctattgtgtgtgtgtgtgtgtgtgtgtgtgtgtgtgtgtgtgtgtgcaggagtgccacccccagggccctgtcaacctctcttttctcctccatggctgtctgcctgcgtatctgtctctgagaatcctcggggcggtcaggggatgtcaggaggggaaggagccgccctccctatcttgctgctcctcttggcactcaggggcaccttccatggagccagaccgggtggaggggcttctgggatttggtgtctgctgctgccagagcaggaacccccagtctaggacttgggcattttaacagggagaaagtagtggcttcccttttctctctctcctcctttttccctttaagcccacagattcaggtcatgccaaaagctctctggttgtaacctggagacatgtggaggggaatggcgatgggattataggactctccccatctcgggccctgaccctgacccttgccaccaacccaaagacagctggtgggtttccccttggagacaatcctgcgtttgcctgggccggccctggctgccctcagctttcgctgatctgcccggcctggagcctcccatcaccccgcttcttgttgggcctcaggcactggttaccagaagggggtctgggtctgctcaggatcatgttttgtagcacctcctgttggaggggtggagggatgttcccctgagccaggctgagactagaaccccatcttccctgagccaggctgagactagaaccccatcttccccaccacgccacccctgtggctgctacaggagcacagtagtgaaggcctgagctccaggtttgaaagacccaactggagcgtggggcgggcaggcaggggttagtgaaaggacacttccagggttaggacagagcatttagccttctggaagaacccctgcctggggtgggactgtgcaggccagagaaggtggcatgggcctgaacccacctggactgacttctgcactgaagccacagatggagggtaggctggtgggtgggggtggttcgttctctagccggggcagacacccagctggctgggtccttcctcagccttgcctcctcctgtccccaaccctttcctttcctcctgcttgcggactgctggtcccctctccttccctccttccagctgtttctagttaccacctacccctggccgtggactgatcagaccagcattcaaaataaaagtttgttccaagttgacagtgtggtgctccctgcccagcccctccaggtggaggtgctgccacgggaacgcagttgctctgcctgccctggggcccctggcgacagtgggagcagggcagtgctgtgaggagcccagctttcccagtcaggcaggcatggcttccgtgttcaggctccctcaccagctggtgacacgggacaagcttacaaaccttctctgaacctcagttttctcatttacaagaggcaaagcatccatcaccttgtgtggattcaragaatgtraggccctggggtgtcctacacaagggaaaggcttgctcagtgagcggtctgcacaccgktagccaccctgscacctctgngccctgggcaggcttcaaagggaaaagcttttggcttgggactggccaggaagtnttnaaaacgcttcctgggtggacaatttcccaagcaanccggnccccttgaangg

SEQ ID NO: 2042 - DNA, 3298 bp, Homo sapiens
  misc_feature (3298)..(3298): n equals a,t,g, or c
ggtacgcctgcaggtaccggtccggaattcccgggtcgacccacgcgtccggtgggtgctggccaggacggttccttcagagcaaacagcagggagatgccggcccgctccttcccagctcctccccgtgcccgctaacacagcacggccgcctgcagtctcctctctgggtgattgcgcgggcctaagatgtgtcctggggcactgtgggtggccctgcccctgctgtccctgctggctggctccctacaggggaagccactgcagagctggggacgagggtctgctgggggaaacgcccacagcccactgggggtgcctggaggtgggctgcctgagcacaccttcaacctgaagatgtttctggagaacgtgaaggtggatttcctgcgcagccttaacctgagtggggtcccttcgcaggacaaaaccagggtggagccgccgcagtacatgattgacctgtacaacaggtacacgtccgataagtcgactacgccagcgtccaacattgtgcggagcttcagcatggaagatgccatctccataactgccacagaggacttccccttccagaagcacatcttgctcttcaacatctccattcctaggcatgagcagatcaccagagctgagctccgactctatgtctcctgtcaaaatcacgtggacccctctcatgacctgaaaggaagcgtggtcatttatgatgttctggatggaacagatgcctgggatagtgctacagagaccaagaccttcctggtgtcccaggacattcaggatgagggctgggagaccttggaagtgtccagcgccgtgaagcgctgggtccggtccgactccaccaagagcaaaaataagctggaagtgactgtggagagccacaggaagggctgcgacacgctggacatcagtgtccccccaggttccagaaacctgcccttctttgttgtcttctccaatgaccacagcagtgggaccaaggagaccaggctggagctgagggagatgatcagccatgaacaagagagcgtgctcaagaagctgtccaaggacggctccacagaggcaggtgagagcagtcacgaggaggacacggatggccacgtggctgcggggtcgactttagccaggcggaaaaggagcgccggggctggcagccactgtcaaaagacctccctgcgggtaaacttcgaggacatcggctgggacagctggatcattgcacccaaggagtatgaagcctacgagtgtaagggcggctgcttcttccccttggctgacgatgtgacgccgacgaaacacgctatcgtgcagaccctggtgcatctcaagttccccacaaaggtgggcaaggcctgctgtgtgcccaccaaactgagccccatctccgtcctctacaaggatgacatgggggtgcccaccctcaagtaccattacgagggcatgagcgtggcagagtgtgggtgcaggtagtatctgcctgcggggctggggaggcaggccaaaggggctccacatgagaggtcctgcatgcccctgggcacaacaaggactgattcaatctgcatgccagcctggaggaggaaagggagcctgctctccctccccacaccccacccaaagcatacaccgctgagctcaactgccagggaaggctaaggaaatggggatttgagcacaacaggaaagcctgggagggttgttgggatgcaaggaggtgatgaaaaggagacagggggaaaaataatccatagtcagcagaaaacaacagcagtgaaccagaggagcacaggcgggcaggtcactgcagagactgatggaagttagagaggtggaggaggccagctcgctccaaaacccttggggagtagagggaaggagcaggccgcgtgtcacacccatcattgtatgttatttcccacaacccagttggaggggcatggcttccaatttagagacataaaacacaggcagatcaagtagcattgatcaatggcatgattccaactcagatttgtgggacaccaaagcccaggatcttcccaagtgccctgctgcagtttagcaggtcctctccagctaaagagcagtgagacattgggagcccaggagtgttgaggccaggccaggctgaggcccatcagtcacaggtgtgactgggctgcttgtcacacacagggcgtggtctggccactgttgccagtgctcactcagcggccacatgctttttaatatgacccctgaggcactgaaaaataaccccaggccaactgcaggatagagagagaggtcaggacagcagccctgtgggctgcatgatacactgtggctggagttattgtgaccccctggtgcagtgctcccacggccagtggtgcacacagggccattcactgtccatagactgaaaccatgtgaccatttgagagggccgggcacactttcccctgagggatggggcagcctgtggccagcacctctgcagttactctgcatagccagctcaccagcatgccatgcccagggtgccccccagtgacaacctcatgggagacgggcctggatttgaatttgttggaattaaatgtgctctggctttggtctttgaaacatatctatttttattccttggtgacatgtccttaagtgacaagactccagccttcctgggcgaggcctctccagcctcggaagagctgcagtccttatcggctatcactggctctgcctgcatttgccggctctcttgagtcacgtgcatcccagcaccccgcctgggctcggactgtgggaccagactcagcctccccgaacacaagggaagataaggcttccatttgctctgtgtttcaccctctcctctgtctctccaggccacacatggaacggggcggtatgaggaagagtctgaaagtggtgaagagtgcacctatggccctctgacctccagccagagcagggcctaggggaggcttagagaggccagggcctctccccgtggttgaagctcccatttatttaagaaaaagtggggggtggggaaaacgttatgttaaatgtttacatggaaccaatgaacaactttaacacacaaatacaacgaaacattcttgtttaattactggcgttatagaaaatatgaattcctgctacatgccgggcagtgtagtgttacaatgctattccaagttgggtgttgagcatcttctttcagtcctggtggtgtgcttctgtgcctgcttgaaaatttcactcggaaataaagtcaaatgtctaaaaaaaaaaaaaaaan

SEQ ID NO: 2043 - DNA, 3258 bp, Homo sapiens
cccacgcgtccggtgggtgctggccaggacggttccttcagagcaaacagcagggagatgccggcccgctccttcccagctcctccccgtgcccgctaacacagcacggccgcctgcagtctcctctctgggtgattgcgcgggcctaagatgtgtcctggggcactgtgggtggccctgcccctgctgtccctgctggctggctccctacaggggaagccactgcagagctggggacgagggtctgctgggggaaacgcccacagcccactgggggtgcctggaggtgggctgcctgagcacaccttcaacctgaagatgtttctggagaacgtgaaggtggatttcctgcgcagccttaacctgagtggggtcccttcgcaggacaaaaccagggtggagccgccgcagtacatgattgacctgtacaacaggtacacgtccgataagtcgactacgccagcgtccaacattgtgcggagcttcagcatggaagatgccatctccataactgccacagaggacttccccttccagaagcacatcttgctcttcaacatctccattcctaggcatgagcagatcaccagagctgagctccgactctatgtctcctgtcaaaatcacgtggacccctctcatgacctgaaaggaagcgtggtcatttatgatgttctggatggaacagatgcctgggatagtgctacagagaccaagaccttcctggtgtcccaggacattcaggatgagggctgggagaccttggaagtgtccagcgccgtgaagcgctgggtccggtccgactccaccaagagcaaaaataagctggaagtgactgtggagagccacaggaagggctgcgacacgctggacatcagtgtccccccaggttccagaaacctgcccttctttgttgtcttctccaatgaccacagcagtgggaccaaggagaccaggctggagctgagggagatgatcagccatgaacaagagagcgtgctcaagaagctgtccaaggacggctccacagaggcaggtgagagcagtcacgaggaggacacggatggccacgtggctgcggggtcgactttagccaggcggaaaaggagcgccggggctggcagccactgtcaaaagacctccctgcgggtaaacttcgaggacatcggctgggacagctggatcattgcacccaaggagtatgaagcctacgagtgtaagggcggctgcttcttccccttggctgacgatgtgacgccgacgaaacacgctatcgtgcagaccctggtgcatctcaagttccccacaaaggtgggcaaggcctgctgtgtgcccaccaaactgagccccatctccgtcctctacaaggatgacatgggggtgcccaccctcaagtaccattacgagggcatgagcgtggcagagtgtgggtgcaggtagtatctgcctgcggggctggggaggcaggccaaaggggctccacatgagaggtcctgcatgcccctgggcacaacaaggactgattcaatctgcatgccagcctggaggaggaaagggagcctgctctccctccccacaccccacccaaagcatacaccgctgagctcaactgccagggaaggctaaggaaatggggatttgagcacaacaggaaagcctgggagggttgttgggatgcaaggaggtgatgaaaaggagacagggggaaaaataatccatagtcagcagaaaacaacagcagtgaaccagaggagcacaggcgggcaggtcactgcagagactgatggaagttagagaggtggaggaggccagctcgctccaaaacccttggggagtagagggaaggagcaggccgcgtgtcacacccatcattgtatgttatttcccacaacccagttggaggggcatggcttccaatttagagacataaaacacaggcagatcaagtagcattgatcaatggcatgattccaactcagatttgtgggacaccaaagcccaggatcttcccaagtgccctgctgcagtttagcaggtcctctccagctaaagagcagtgagacattgggagcccaggagtgttgaggccaggccaggctgaggcccatcagtcacaggtgtgactgggctgcttgtcacacacagggcgtggtctggccactgttgccagtgctcactcagcggccacatgctttttaatatgacccctgaggcactgaaaaataaccccaggccaactgcaggatagagagagaggtcaggacagcagccctgtgggctgcatgatacactgtggctggagttattgtgaccccctggtgcagtgctcccacggccagtggtgcacacagggccattcactgtccatagactgaaaccatgtgaccatttgagagggccgggcacactttcccctgagggatggggcagcctgtggccagcacctctgcagttactctgcatagccagctcaccagcatgccatgcccagggtgccccccagtgacaacctcatgggagacgggcctggatttgaatttgttggaattaaatgtgctctggctttggtctttgaaacatatctatttttattccttggtgacatgtccttaagtgacaagactccagccttcctgggcgaggcctctccagcctcggaagagctgcagtccttatcggctatcactggctctgcctgcatttgccggctctcttgagtcacgtgcatcccagcaccccgcctgggctcggactgtgggaccagactcagcctccccgaacacaagggaagataaggcttccatttgctctgtgtttcaccctctcctctgtctctccaggccacacatggaacggggcggtatgaggaagagtctgaaagtggtgaagagtgcacctatggccctctgacctccagccagagcagggcctaggggaggcttagagaggccagggcctctccccgtggttgaagctcccatttatttaagaaaaagtggggggtggggaaaacgttatgttaaatgtttacatggaaccaatgaacaactttaacacacaaatacaacgaaacattcttgtttaattactggcgttatagaaaatatgaattcctgctacatgccgggcagtgtagtgttacaatgctattccaagttgggtgttgagcatcttctttcagtcctggtggtgtgcttctgtgcctgcttgaaaatttcactcggaaataaagtcaaatgtctaaaaaaaaaaaaaaaa

SEQ ID NO: 2044 - DNA, 980 bp, Homo sapiens
gctgctctggcaaccaatagaagctaggagagggcggggacaactgggtcttttgcggctgcagcgggcttgtaggtgtccggctttgctggcccagcaagcctgataagcatgaagctcttatctttggtggctgtggtcgggtgtttgctggtgcccccagctgaagccaacaagagttctgaagatatccggtgcaaatgcatctgtccaccttatagaaacatcagtgggcacatttacaaccagaatgtatcccagaaggactgcaactgcctgcacgtggtggagcccatgccagtgcctggccatgacgtggaggcctactgcctgctgtgcgagtgcaggtacgaggagcgcagcaccaccaccatcaaggtcatcattgtcatctacctgtccgtggtgggtgccctgttgctctacatggccttcctgatgctggtggaccctctgatccgaaagccggatgcatayactgagcaactgcacaatgaggaggagaatgaggatgctcgctctatggcagcagctgctgcatccctcgggggaccccgagcaaacacagtcctggagcgtgtggaaggtgcccagcagcggtggaagctgcaggtgcaggagcagcggaagacagtcttcgatcggcacaagatgctcagctagatgggctggtgtggttgggtcaaggccccaacaccatggctgccagcttccaggctggacaaagcagggggctacttctcccttccctcggttccagtcttccctttaaaagcctgtggcatttttcctccttctccctaactttagaaatgttgtacttggctattttgattagggaagagggatgtggtctctgaaaaaaaaaaaaaaaaaaaaaaaaaaaaaaaaaaaaaaaaaaaaaaaaaaaaaaaaaaaaaaaaaaaaaaaaaaaaaaaaaaaaaaaaaaaaaaaaaaaaaaaaaaaaaaaaaaaaaaaaa

SEQ ID NO: 2045 - DNA, 954 bp, Homo sapiens
acgcgtccgcggggacaactgggtcttttgcggctgcagcgggcttgtaggtgtccggctttgctggcccagcaagcctgataagcatgaagctcttatctttggtggctgtggtcgggtgtttgctggtgcccccagctgaagccaacaagagttctgaagatatccggtgcaaatgcatctgtccaccttatagaaacatcagtgggcacatttacaaccagaatgtatcccagaaggactgcaactgcctgcacgtggtggagcccatgccagtgcctggccatgacgtggaggcctactgcctgctgtgcgagtgcaggtacgaggagcgcacaccaccaccatcaaggtcatcattgtcatctacctgtccgtggtgggtgccctgttgctctacatggccttcctgatgctggtggaccctctgatccgaaagccggatgcatatactgagcaactgcacaatgaggaggagaatgaggatgctcgctctatggcagcagctgctgcatccctcgggggaccccgagcaaacacagtcctggagcgtgtggaaggtgcccagcagcggtggaagctgcaggtgcaggagcagcggaagacagtcttcgatcggcacaagatgctcagctagatgggctggtgtggttgggtcaaggccccaacaccatggctgccagcttccaggctggacaaagcatggggctacttctcccttccctcggttccagtcttccctttaaaagcctgtggcattttcctccttctccctaactttagaaatgttgtacttggctattttgattagggaagagggatgtggtctctgaaaaaaaaaaaaaaaaaaaaaaaaaaaaaaaaaaaaaaaaaaaaaaaaaaaaaaaaaaaaaaaaaaaaaaaaaaaaaaaaaaaaaaaaaaaaaaaaaaaaaaaaaaaaaaaaaaaaaaaaaa

SEQ ID NO: 2046 - DNA, 2127 bp, Homo sapiens; identical to SEQ ID NO: 1526

SEQ ID NO: 2047 - DNA, 1867 bp, Homo sapiens; identical to SEQ ID NO: 612

SEQ ID NO: 2048 - DNA, 586 bp, Homo sapiens
ctcaccctcctgtgcatggggctcctgtgtctgcggtaccacttgaacctgtccccgcagcgggtacaagggacccccgagctgagccagccgaacccggggccccctaagctacagctacacgatgtcttcattgcagtgaagacgacccgggctttccaccgcttgygcctggagctgctgcttgacacgtgggtttccaggaccagggaacagacatttgtcttcaccgacagcccagacaaaggcctccaggagagactggggtcccaccttgtggtcaccaactgctccgcggaacacagccacccagctctgtcctgcaagatggctgctgagttcgacacctggagaccctgcagctgctgaggactgcacagctcccagaacaggtcaccctcagctacggtgtctttgaggggaaactcaacgtcattaagctacagggccccttctccccggaggaggacccctccagatttcgctccctycattgtctgctctatccagatacaccctggtgtccccagctgggtgcccgatgaatccctgaacttgctgggcaaggcttcttggttgttagggg

SEQ ID NO: 2049 - DNA, 3496 bp, Homo sapiens
gctgccgcgtctcgacgtgtcaccggcggcgccgctgctgtggcaaaggaaggagctgactgggggagttcgaggcggcgggcggcggtgaccccggcctggaactgccccggtacggaagtgttccggggtccgtggggagcaggagagggaggcggcggaccgtcccgcgcggggcacgatgttgaacatgtggaaggtgcgcgagctggtggacaaagccaccaatgttgttatgaattattcagagatcgagtctaaggttcgagaggcaacgaacgatgatccttggggaccttctgggcaactcatgggagagattgccaaggctacatttatgtatgaacaatttccagaacttatgaacatgctttggtcacgaatgttaaaagacaacaaaaagaattggagaagagtttataagtcgttgctgctcctagcttacctcataaggaatggatcagagcgtgttgttacaagtgccagagaacacatttatgatttacgatccctggaaaattaccactttgtagatgagcatggtaaggatcaaggtataaatattcgacagaaggtgaaggaattggttgaatttgcccaggatgacgacaggcttcgtgaagagcgaaagaaagcaaagaagaacaaagacaagtatgttggggtttcctcagacagtgttggaggattcagatacagtgaaagatatgatcctgagcccaaatcaaaatgggatgaggagtgggataaaaacaagagtgcttttccattcagtgataaattaggtgagctgagtgataaaattggaagcacaattgatgacaccatcagcaagttccggaggaaagatagagaagactctccagaaagatgcagcgacagcgatgaggaaaagaaagcgagaagaggcagatctcccaaaggtgaattcaaagatgaagaggagactgtgacgacaaagcatattcatatcacacaggccacagagaccaccacaaccagacacaagcgcacagcaaatccttccaaaaccattgatcttggagcagcagcacattacacaggggacaaagcaagtccagatcagaatgcttcaacccacacacctcagtcttcagttaagacttcagtgcctagcagcaagtcatctggtgaccttgttgatctgtttgatggcaccagccagtcaacaggaggatcagctgatttattcggaggatttgctgactttggctcagctgctgcatcaggcagtttcccttcccaagtaacagcaacaagtgggaatggagactttggtgactggagtgccttcaaccaagccccatcaggccctgttgcttccagtggcgagttctttggcagtgcctcacagccagcggtagaacttgttagtggctcacaatcagctctaggcccacctcctgctgcctcaaattcttcagacctgtttgatcttatgggctcgtcccaggcaaccatgacatcttcccagagtatgaatttctctatgatgagcactaacactgtgggacttggtttgcctatgtcaagatcacagcctttgcaaaatgttagcacagtgctgcagaagcctaatcctctctataatcagaatacagatatggtccagaaatcagtcagcaaaaccttgccctctacttggtctgaccccagtgtaaacatcagcctagacaacttactacctggtatgcagccttccaaaccccagcagccatcactgaatacaatgattcagcaacagaatatgcagcagcctatgaatgtgatgactcaaagttttggagctgtgaacctcagttctccatcgaacatgcttcctgtccggccccaaactaatgctttgatagggggacccatgcctatgagcatgcccaatgtgatgactggcaccatgggaatggcccctcttggaaatactccgatgatgaaccagagcatgatgggcatgaacatgaacatagggatgtccgctgctgggatgggcttgacaggcacaatgggaatgggcatgcccaacatagccatgacttctggaactgtgcaacccaagcaagatgcctttgcaaatttcgccaattttagcaaataagagattgtaaaagaagcagattgaatgaagaatttttagctgtgcagataggtgatgttgggatggaaaatgctaatcaactaccctttcttttatcaagtaattaaaataaatctacataaagaaccaaaaaggctgttttataaaagtgaaatatccagtatttcagagggccaggcaagagcacttcagatgaggcagtcaaaatcatttttttccagtgaggatagaccacaagtgggtggtgagaccattgaaagcctttatcaactgaagagtccatttaacagcataatttgtgggaagactggaatagggctgaataaatgtgtttgaatctctaattttatactttcttttcctgaggaacttgatttttctgtccctggatcgccttgtcataattgggtctgttccttttactaccactcttgagtccatatatgaaatcattaaagttggatgatcagttttttataaaaatatatatttttgtccaagaaaaaaaaaagcatacatatgtgattatggctaaatcaaaggtaactggaatgtatatacttttgctaatgttccagcaacactgctattatactatccaaatttttattgtaacaaaacctctttaagcaattggtgattgccatgggacttttcccatgtcttctgctgtaattatcctgtgcagaactaggaagaaatttttttcaggactgctctatggtttcctttaaaagaaaaaaacttctgtttgtttttagcagtcattatttacaatttgcagtgattaacttggcaaggcttccttccgtgtttatccctgtagccatcatttaagtcaggaacagtcagaaaaatatttattttattttttttttgggtgtctgcaaaggtaaaaatccattaaaaccttaagttaaatataaatgttacaactcaatgtttgcttttagattttatacagtatttgttttgttttggttttgagtgtatataatgcagcattagcaatatggttccaatagaggagttaaatatatattgttaaaggagacctgtagcagtcaaagattttattgatttaatgacaaaggaaattaatgaaaatgtttttgtttttctgctgtaattctgcattaagctcacatgaaaatcaygattctagagtttggaatgcaaaattaattgttttaccctcaagctgggaatatttttcaaaataaatactataatatagatatcaaattattacctccccatgttatgttgaaaatttttttattaaattgataaaactttatttccattatattcataatgttctgttatacataacattaaaatgttcattaaaatcaaaaaaaaaaaaaaaaaaaaaaaaaa

SEQ ID NO: 2050 - DNA, 984 bp, Homo sapiens
ggcacgagaagaaaatctccttcccctgggcttccatttagcctgtaaaataagggtaaaatactcttgtccctgtccacagtgaaggtagtgatggcagtccttctcaggttagtttaccacttctgggcatcagctacatgcccagatgtgggccatgtgcgggcagaacctgttttgcataagtgacattcattctgccagcacagaatgaatacttctgccacctgccacttgcaccttctattcaacattggttttgagatttattcatatggatacgtgcaggttttatgcattaaatgctctacaatatctcttttgtgaatatgccgcaatttacccaagctcttgtttattaacattgagggagtttccaattttttcatatcagaaactctgctgctactctaagtattctcacacacacctccctatttacatgttccacaatttctcagcaagatgtatctgcacaggagtgctgggtcataggctatgtttascttcatctttaatagtcatggtcaaattgttttccaaagtgatcgtattaatttatattctaacagtagtatttgagagttccttgctccatttcttgccagcgtttggtattgtcagactataaaatgttttccattccaatggacgggaaatagcacccgttgcggttgtaatgtgcacgtccccagttactaatgcggttgtgcagttcacatgttaattcaccatttgtgattcctcttctatgagcacttattcatatactttggatattttactattgttttcctttttctttttttattttttaatattctggatacaagttctatgttcattgtgtatactgcaaaatcttctcccagtttcccatgtatctttttattatgtttgtactgtactttgctgaacagcaatttaggtttcattttagtcaaatatatcatgtctctgatttaaaaaaaaaaaaaaaaaaaa

SEQ ID NO: 2051 - DNA, 1057 bp, Homo sapiens; identical to SEQ ID NO: 355

SEQ ID NO: 2052 - DNA, 612 bp, Homo sapiens
  misc_feature (586)..(586): n equals a,t,g, or c
acatagaactagtggatcccccggggctgcaggaattcggcacgagagagcctccactgagctgctgcctgcccgccacatacccagctgacatgggcaccgcaggagccatgcagctgtgctgggtgatctgggsttcctcctgttccgaggccacaactcccagcccacaatgacccagacctctagctctcagggargccttggcggtctaagtctgaccacagagccagtttcttccaacccaggatacatcccttcctyagaggctaacargccaagccatctgtccagcactggtaccccaggcgcaggtgtccccagcagtggaagagacggaggcacaagcagagacacatttcaaactgttccccccaattcaaccaccatgagcctgagcatgagggaagatgcgaccatcctgcccagccccacgtcagagactgtgctcactgtggctgcatttggtgttatcagtttcattgtcatcctggtggttgtggtgatcatcctagttggtgtggtcagcctgaggttcaagtgtcggaagagcaaggagtctgaagatccccagaaacttgggagntcagggctgtctgaaagctgctccac

SEQ ID NO: 2053 - DNA, 1050 bp, Homo sapiens; identical to SEQ ID NO: 1697

SEQ ID NO: 2054 - DNA, 695 bp, Homo sapiens; identical to SEQ ID NO: 1632
  misc_feature (2)..(2): n equals a,t,g, or c
  misc_feature (29)..(29): n equals a,t,g, or c
  misc_feature (43)..(43): n equals a,t,g, or c
  misc_feature (51)..(51): n equals a,t,g, or c

SEQ ID NO: 2055 - DNA, 2085 bp, Homo sapiens; identical to SEQ ID NO: 306
  misc_feature (2062)..(2062): n equals a,t,g, or c
  misc_feature (2065)..(2065): n equals a,t,g, or c
  misc_feature (2084)..(2084): n equals a,t,g, or c

SEQ ID NO: 2056 - DNA, 1719 bp, Homo sapiens
ctgggagcgcagtacgcgttttctggagcatgggcagaggagacaggaacaagcgtagcatccgtgagcaccgattggctgaagcgagcaccccgggagctgactggctccgccattcgcgggaaggcgtttgtggtgccagagaaaagtagccagagcggcgcagtggcggccgcgttctgtggttttccgctattcccccagacccgcaccttctcggcctctttgcggagaatcgtgaccaagatgtggaacagtggattcgaaagctatggcagctcctcatacgggggagccggcggctacacgcagtccccggggggctttggatcgcccgcaccttctcaagccgaaaagaaatcaagagcccgagcccagcacattgtgccctgtactatatctcagctgctttctgccactttggttgatgaagtgttcagaattgggaatgttgagatttcacaggtcactattgtggggatcatcagacatgcagagaaggctccaaccaacattgtttacaaaatagatgacatgacagctgcacccatggacgttcgccagtgggttgacacagatgacaccagcagtgaaaacactgtggttcctccagaaacatatgtgaaagtggcaggccacctgagatcttttcagaacaaaaagagcctggtagcctttaagatcatgcccctggaggatatgaatgagttcaccacacatattctggaagtgatcaatgcacacatggtactaagcaaagccaacagccagccctcagcagggagagcacctatcagcaatccaggaatgagtgaagcagggaactttggtgggaatagcttcatgccagcaaatggcctcactgtggcccaaaaccaggtgttgaatttgattaaggcttgtccaagacctgaagggttgaactttcaggatctcaagaaccagctgaaacacatgtctgtatcctcaatcaagcaagctgtggattttctgagcaatgaggggcacatctattctactgtggatgatgaccattttaaatccacagatgcagaataactggatctaactgggtacctgagatattttacagctggacctagtttcacaatctgttgtctccagctctgcatatgtctggccagggggcttctaggaagtaggtttcatctatcaaatgtctcctctgacttccttttgaaacttactgctcttctgttttattttgttttgtttgaagctcagagggagatgggcaattgacagggatgcaatccagggtgggatttcttgaggaagttacaaataagcttgttacaacatcaagatagatggaattggaaggatgctaccaggagagtacttacatagtgctcaggagtttctcttcttaaaatgtttactgctgaaagatgagcaggaccagggcgttataggcagagccctagccgagaaacctgctggcctctgcctgttttcatttcccactttggttgtgtggcattactttcagaattgcactttcctgcttgtcatgactttttgacacacttgccatgacgtgtgtttctgtgaacatgaagttctgcggtagtgcctccaggggcagaggaaaagaagaagtgttactgcrttttgtacaaaataaatacagtcatatgtttaataaaacagttctattgtagtaaaaaaaaaaaaaaaaaaaaaaaaaaactcgta

SEQ ID NO: 2057 - DNA, 538 bp, Homo sapiens
  misc_feature (369)..(369): n equals a,t,g, or c
  misc_feature (469)..(469): n equals a,t,g, or c
  misc_feature (482)..(482): n equals a,t,g, or c
  misc_feature (531)..(531): n equals a,t,g, or c
aattcggcacgagggactgtgtctccttttctctgcctgtggtgcttcatgcctattgacactcagtgaatgcttgaatgattgggctccatggataccaaaatagcagactctgggtaattttcttcttgctgctactcttctctggttcgtctgacatcacaaacaaaaggagccaagagtatctttctctttttgatatttatgtgcttcggggagttactttatcttcctgtgaaatactcattagataatagctgtccactccaatgtaagcagtgttataaactgggaaactgtttataaatgttttttgtaagctgcttaacgrgctattttaagtagtaaagactgtttaacttgatgggntttctaatatgctaactatttcttaatcagccctcagcaggagagcacctatcagcaatccaggaatgagtgaagcaagggaactttggtggggaatagnttccatgccagcnaatgggctcactgtgggcccaaaaccaggtggttgaattttgaattaanggcttgt

SEQ ID NO: 2058 - DNA, 1840 bp, Homo sapiens
aattcggcacgagtgcaggtcgactctagaggatccccgctaagaagctagggctattggtcttcccatacacacatcagaactgaggcaccatgcaagggggccagagacctcatctcctcttgctgctgttggctgtctgcctgggggcccagagccgcaaccaagaggagcgtctgcttgcggacctgatgcgaaactacgacccccacctgcggccggctgagcgcgactcagatgtggtcaatgtcagcctgaagcttaccttgaccaacctcatctccctgaatgaacgagaggaggccctcacaactaacgtctggatagagatgcaatggtgcgactatcgcctgcgctgggacccaaaagactacgaaggcctgtggatattgagggtgccatctactatggtctggcggccagatatcgtcctggagaacaatgtggacggtgtcttcgaggtggctctctactgcaatgtcctcgtgtcccccgacggttgtatctactggctgccgcctgccatcttccgctcctcctgctccatctctgtcacctacttccccttcgattggcagaactgttccctcatcttccaatcccagacttacagcaccagtgagatcaacttgcagctgagccaggaggatgggcaagccattgagtggatcttcattgacccggaggctttcacagagaatggggagtgggccatccggcaccgaccggctaaaatgctcctggactccgtggctcctgcagagraggcgggccaccagaaggtggtgttctacctgcttatccagcgcaagcccctcttctacgtcatcaacatcatcgccccctgtgtgctcatctcctcagtcgccatcctcatctacttccttcctgctaaggcgggcggccagaaatgcacagtggccaccaacgtgctcctggcccagactgtcttccttttccttgtggctaagaaggtgcctgagacctcccaggcagtgccactcatcagcaagtacctgaccttcctcatggtggtgaccatcctcatcgtcgtgaactctgtggtcgtgctcaatgtgtccttgcggtccccccacacacactccatggcccgtggggtccgcaaggtgttcctgaggctcctgccccagctgttacggatgcatgtgcgcccactagctccagctgctgtccaggatgcccggttccgactccagaatggctcttcctcagggtggcccatcatggctcgagaggaaggggacctctgtctgcctcgaagcgaactcctctttaggcaaaggcagcgcaatggattagtgcaggcagtattggagaagctagagaatggtccagaagtgaggcagagccaggagttctgtggcagcctgaagcaagcctccccagccatccaggcctgtgtggatgcctgtaacctcatggctcgtgcccgacgccagcagagtcactttgacagtgggaacgaggagtggttgctggtgggccgagtgctggaccgagtctgcttcctagccatgctctccctcttcatctgtggcactgctggcatcttcctcatggcccactacaaccaagtgcctgacctgccgttccccggagacccccgcccctacctgcctttgccagactgagccaaccaatccctcctgggccctggagtcagctatgagggccatgctgtttgtagagctgtatcccgtgttgatgctgagtgtgctcttggggaaatacccaaggcttcctgggagaagatagagaaataaagagacagaggggaaaaaaaaaaaaaaaaaaaaaaaaaaaaaaaaaaaactcgtag

SEQ ID NO: 2059 - DNA, 1700 bp, Homo sapiens; identical to SEQ ID NO: 1937
  misc_feature (38)..(38): n equals a,t,g, or c

SEQ ID NO: 2060 - DNA, 434 bp, Homo sapiens
  misc_feature (179)..(179): n equals a,t,g, or c
  misc_feature (347)..(347): n equals a,t,g, or c
  misc_feature (353)..(353): n equals a,t,g, or c
aaattcccgggtcgacccacgcgtccgtgcactgggaatctaggatgggggccttggccagagccctgccgtccatactgctggcattgctgcttacgtccaccccagaggctctgggtgccaaccccggcttggtcgccaggatcaccgacaagggactgcagtatgcggcccaggangggctattggctctgcagagtgagctgctcaggatcacgctgcctgacttcaccggggacttgaggatcccccacgtcggccgtgggcgctatgagttccacagcctgaacatccacagctgtgagctgcttcactctgcgctgaggctgtcccyggccagggctgantctcancatctccgactcctccatccgggtccaaggcaagtggaaagtgcgcaagtcatccttcaaactacaaggctcctttgatgt

SEQ ID NO: 2061 - DNA, 797 bp, Homo sapiens; identical to SEQ ID NO: 478

SEQ ID NO: 2062 - DNA, 821 bp, Homo sapiens
  misc_feature (817)..(817): n equals a,t,g, or c
ttgtgccctagcagattccgtcgcttcttccggagccgtacgtggcaccgccccgctcgcgggcggccgcggggcttgctgggaagagaggcgaagccaggtcacctttcaaggacccagaagtagggttttggcctaggtaacggggcagagatgtggttcgagattctccccggactctccgtcatgggcgtgtgcttgttgattccaggactggctactgcgtacatccacaggttcactaacgggggcaaggaaaaaagggttgctcattttgggtatcactggagtctgatggaaagagataggcgcatctctggagttgatcgttactatgtgtcaaagggtttggagaacattgattaaggaagcattttcctgattgatgaaaaaaataactcagttatggccatctacccctgctagaaggttacagtgtattatgtagcatgcaatgtgttatgtagtgcttaataaaaataaaatgaaaaaaaaaaaaaaaagggcggccgytctagaggatccctcgaggggcccaagcttacgcgtgcatgcgacgtcatagctctctccctatagtgagtcgtattataagctagcttgggatctttgtgaaggaacttacttctgtggtgtgacataattggacaaactacctacagagatttaaagctctaaggtaaatataaaatttttaagtgtataatgtgttaaactagctgcatatgcttgctgcttgagaattttgcttactgartatgatttatgaaaatattatacacaggagctagtgattctaattgtttgtgtattttanattc

SEQ ID NO: 2063 - DNA, 1806 bp, Homo sapiens
  misc_feature (1803)..(1806): n equals a,t,g, or c
taatcaaagctcaggaggagagctgcattccactgtttcacagatgctgtgagggtgacaaagatgcagggcacccactggaaacacagacggcactctgcgaaagaggaaggggcgccaggagcttgggtgagcaaggttggaggtgattctgcccctctccccaggctttctgtattagaaaactgaagcttcaagaacagacttgcctaacaacaggaaacttgtatgtctcgaagtggcaattcacacataaggctccatgactcctgaactctcacaaatattagttggctcttttcatggttttactgaagttgctagaagtttacagaaaaggaagtgcaggaacatttcacaaatctacaatctgtgagtatcacatcctgtatagctgtmaacactggaataaggaagggctgatgactttcagaagatgaaggtaagtagaaaccgttgatgggactgagaaaccagagttaaaacctctttggagcttctgaggactcagctggaaccaacgggcacagttggcaacaccaccaccatcaacttctcccaagcagagaaacccgaacccaccaaccaggggcaggatagcctgaagaaacatctacacgcagaaatcaaagttattgggactatccagatcttgtgtggcatgatggtattgagcttggggatcattttggcatctgcttccttctctccaaattttacccaagtgacttctacactgttgaactctgcttacccattcataggaccctttttttttatcatctctggctctctatcaatcgccacagagaaaaggttaaccaagcttttggtgcatagcagcctggttggaagcattctgagtgctctgtctgccctggtgggtttcattatcctgtctgtcaaacaggccaccttaaatcctgcctcactgcagtgtgagttggacaaaaataatataccaacaagaagttatgtttcttacttttatcatgattcactttataccacggactgctatacagccaaagccagtctggctggawctctctctctgatgctgatttgcactctgctggaattctgcctagctgtgctcactgctgtgctgcggtggaaacaggcttactctgacttccctgggagtgtacttttcctgcctcacagttacattggtaattctggcatgtcctcaaaaatgactcatgactgtggatatgaagaactattgacttcttaagaaaaaagggagaaatattaatcagaaagttgattcttatgataatatggaaaagttaaccattatagaaaagcaaagcttgagtttcctaaatgtaagcttttaaagtaatgaacattaaaaaaaaccattatttcactgtcatttaagatatgtgttcattggggatctcttgatttgcctgacattgacttcagcaaaagcacggggctgtaaattaccatttactagattagccaaatagtctgaatttccagaaaacaaggcagaatgatcattcccagaaacatttcccagaaaatgtttcccagaaaactagacagmatgatcattcaatggatcacagtgaagcaaaggacacaactttttattgtaccccttaattgtcaacaggagttaactgatttgttgtggtgctcagacttttttatacaggtgctagtgttttatcctatgtattttaactcattagtgcataaaggcaagccccatataatgaagtctcagggtatatgaaagtagctggcttcaaaataaaatttttgagtgcaaaaaaaaaaaannnn

SEQ ID NO: 2064 - DNA, 963 bp, Homo sapiens
cgcgtccggtgggtttcattatcctgtctgtcaaacaggccaccttaaatcctgcctcactgcagtgtgagttggacaaaaataatataccaacaagaagttatgtttcttacttttatcatgattcactttataccacggactgctatacagccaaagccagtctggctggaactctctctctgatgctgatttgcactctgctggaattctgcctagctgtgctcactgctgtgctgcggtggaaacaggcttactctgacttccctgggagtgtacttttcctgcctcacagttacattggtaattctggcatgtcctcaaaaatgactcatgactgtggatatgaagaactattgacttcttaagaaaaaagggagaaatattaatcagaaagttgattcttatgataatatggaaaagttaaccattatagaaaagcaaagcttgagtttcctaaatgtaagcttttaaagtaatgaacattaaaaaaaaccattatttcactgtcatttaagatatgtgttcattggggatctcttgatttgcctgacattgacttcagcaaaagcacggggctgtaaattaccatttactagattagccaaatagtctgaatttccagaaaacaaggcagaatgatcattcccagaaacatttcccagaaaatgtttcccagaaaactagacagcatgatcattcaatggatcacagtgaagcaaaggacacaactttttattgtaccccttaattgtcaacaggagttaactgatttgttgtggtgctcagacttttttatacaggtgctagtgttttatcctatgtattttaactcattagtgcataaaggcaagccccatataatgaagtctcagggtatatgaaagtagctggcttcaaaataaaatttttgagtgcaaaaaaaaaaaaaaaaaaaaaaaaaaaaaaaaaaaaaaaaaaaaa

SEQ ID NO: 2065 - DNA, 963 bp, Homo sapiens; identical to SEQ ID NO: 2064

SEQ ID NO: 2066 - DNA, 1005 bp, Homo sapiens
  misc_feature (4)..(4): n equals a,t,g, or c
  misc_feature (10)..(10): n equals a,t,g, or c
  misc_feature (46)..(46): n equals a,t,g, or c
cccntgaggncaaaaatcccccccagtgaagaaccactttccactntaatccgtccacgtctttccaactccttcactactgccacagtccaggctactgtcatctctcagcagatgatggcaacagctccctgtgggcctgttctgcctgtccccccgctgctctccaggtcattctccatattgtagccagaatgatcttttcagaactcaaatctcatcatgttactccctttaaaaatactgtcggcctcacgcctgtaatcccagcactttgggaggccaaggtgggcagattacgaggtcaggagatcgagaccatcctggctaacacggtgaaaccccatctctactaaaaatmcaaaaaawttagsctgggcgtggtggctcacgcctgtaatcccagcactttggaaggccgaggcagraggatcgtgacgtcgggagatcgagaccatcctggctaacacggtgaaaccccatctctactaaaaatacaaaaaattagccgggtgtgttggtgggcgcctgtagtcccagctactcgggaggctraggsaggagaatggcatgaacccgggaggtagagcttgcagtgagcagagatcgtgccactgcactccagcctgggygacaaagcgaaactccgtctcaaagaaaaaaaatctgttggccaggcscagtggctcatgcctgtaatcccagcactgtgggaggctgagggtgggccaatcacgcggtcaggagttcgagaccagcctggccaacatggtgaaaccccgtctctactaaaaatacaaaaaattagccgggtgtggtggtgggcgcctgtaaccccagctacttgggaggctgaggcaggagaatcacttgaacccaggaggcggaggttgcaatgagcggagatcatgccactgcactctagcctggtgacagaatgagactccatctcaaaaaaaaaaaaaaaaaaagggcggccgctctagaggatccckcgaggggccc

SEQ ID NO: 2067 - DNA, 1509 bp, Homo sapiens
  misc_feature (1427)..(1427): n equals a,t,g, or c
  misc_feature (1480)..(1480): n equals a,t,g, or c
  misc_feature (1500)..(1500): n equals a,t,g, or c
agccagacagcaatggacgaagccttcacagtggaggcaggggctcgagagccctcttctaacatccctaaggtggccatcattgttacagatgggaggccccaggaccaggtgaatgaggtggcggctcgggcccaagcatctggtattgagctctatgctgtgggcgtggaccgggcagacatggcgtccctcaagatgatggccagtgagcccctagaggagcatgttttctacgtggagacctatggggtcattgagaaactttcctctagattccaggaaaccttctgtgcgctggacccctgtgtgcttggaacacaccagtgccagcacgtctgcatcagtgatggggaaggcaagcaccactgtgagtgtagccaaggatacaccttgaatgccgacaagaaaacgtgttcagctcttgataggtgtgctcttaacacccacggatgtgagcacatctgtgtgaatgacagaagtggctcttatcattgtgagtgctatgaaggttataccttgaatgaagacaggaaaacttgttcagctcaagataaatgtgctttgggtacccatgggtgtcagcacatttgtgtgaatgacagaacagggtcccatcattgtgaatgctatgagggctacactctgaatgcagataaaaaaacatgttcagtccgtgacaagtgtgccctaggctctcatggttgccagcacatttgtgtgagtgatggggccgmatcctaccactgtgattgctatcctggctacaccttaaatgaggacaagaaaacatgttcagccactgaggaagcacgaagacttgtttccactgaagatgcttgtggatgtgaagctacactggcattccaggacaaggtcagctcgtatcttcaaagactgaacactaaacatatcctttctggaaggttttctscttctgcctggagccaaccaaggtactacgatcgagccaaacactttaagacattccacaggcaagtgacttatttgttaggttttaatatgagcagtggtaatatacaactttaaaaaatttagagttcttttctaatggtttaatagactgtttcacccattcaatatttacatgtaaaagctgcctattttgtcccctagtgcttttccataactgtatatgctcctaatgatgctcttacataacagatggaacatttatgctaatgactccttaatatggctttcttagttcagaatctgaacatgtacaaagcaagtcagctgattaatggggtgtgatatctcagattacacacagttgtaccctttgactagccaagtggtcaaaaagcagattttaaaatgtaacatgatcaatctcagaactttcaaaatcaggtctttcttcaaaggagtaactagggaaaagttctcaaaacagttcaagntaacaactctggtcctatgaccccaaaggagtggaatttaaaatgggggaagnacaatcttaagcctatgtanaaacctttt

SEQ ID NO: 2068 - DNA, 688 bp, Homo sapiens
  misc_feature (512)..(512): n equals a,t,g, or c
  misc_feature (567)..(567): n equals a,t,g, or c
  misc_feature (627)..(627): n equals a,t,g, or c
  misc_feature (644)..(644): n equals a,t,g, or c
  misc_feature (651)..(651): n equals a,t,g, or c
  misc_feature (677)..(677): n equals a,t,g, or c
aattcccgggtcgacccacgcgtccgggcccacggagcccaccatgccgcgcccggcccccgcgcgccgcctcccgggactcctcctgctgctctggccgctgctgctgctgccctccgccgcccccgaccccgtggcccgcccgggcttccggaggctggagacccgaggtcccgggggcagccctggacgccgcccctctcctgcggctcccgacggcgcgcccgcttccgggaccagcgagcctggccgcgcccgcggtgcaggtgtttgcaagagcagacccttggacctggtgtttatcattgatagttctcgtagcgtacggsccctggaattcaccaaagtgaaaacttttgkctcccggataatcgacactctggacattgggccaagccgacacgcgggtggcagtggtgaactatgctagcactgkgaagatcgagttccaacttcaggcctacacagataagcagkccctgaagcaggccgtgggtcgaatacacccttgncaacaggaccatgtcagcctaagcatcagacagcaatggacgaagctttcacagngaagcaaggggctcgagagccttttaacatcctaagggggcataatgtacagatggaggnccagacaagtgataagngcgggtnggccaaattggattggttatctggcngacggcaaatg

SEQ ID NO: 2069 - DNA, 885 bp, Homo sapiens
  misc_feature (32)..(32): n equals a,t,g, or c
ccaagaaaccatgttcagccactgaggaagcncgaagacttgtttccactgaagatgcttgtgatgtgaagctacactggcattccaggmcaaggtcagctcgtatcttcaaagactgaacactaaacttgatgacattttggagaagttgaaaataaatgaatatggmcaaatacatcgttaaattgctccaatttctcacctgaaaatgtggacagcttggtgtacttaatactcatgcattcttttgcacacctgttattgccaatgttcctgctaataatttgccattatctgtattaatgcttgaatattactggataaattgtatgaagatcttctgcagaatcagcatgattcttccaaggaaatacatatgcagatacttattaagagcaaactttagtgtctctaagttatgactgtgaaatratwrgtaggaaatagaatgaaaagtttagtgtttctttatctactaattgagccatttaatttttaaatgtttatattagataaccatattcacaatggaaactttaggtctagtttcttttgatagtatttataatataaatcaatcttattactgagagtgcaaattgtacaaggtatttacacatacaacttcatataactgagatgaatgtaattttgaactgtttaacactttttgttttttgcttattttgttggagtattattgaagatgtratcaatagattgtaatacacatatctaaaaatagttaacacagatcaagtgaacattacattgccatttttaattcattctggtctttgaaagaaatgtactactaaagagcactagttgtgaatttagggtgttaaactttttaccaagtacaaaaatcccaaattcacttta

SEQ ID NO: 2070 - DNA, 680 bp, Homo sapiens
gctgactctgattcacaggggcagggtccatcattgccgagagtatgtgaacatgcaggatcccgagatggacatgaagtcagtgactgaccgggcagcccgcaccctgctgtggactgagctcttccgaggcctgggcatgaccctgagctacctgttccgggaaccggccaccatcaactacccgttcgagaagggcccgctgagccctcgcttccgtggggagcatgcgctgcgccggtacccatccggggaggagcgttgcattgcctgcaagctctgcgaggccatctgccccgcccaggccatcaccatcgaggctgagccaagagctgatggcagccgccggaccacccgctatgacatcgacatgaccaagtgcatctactgcggcttctgccaggaggcctgtcccgtggatgccatcgtcgagggccccaactttgagttctccacggagacccatgaggagctgctgtacaacaaggagaagttgctcaacaacggggacaagtgggaggccgagatcgccgccaacatccaggctgactacttgtatcggtgacgccccaccggcccgcagcccctgctgcccaataaaaccactccgaccccaaaaaaaaaaaaaaaaaaaaaaaaaaaaaaaaaaaaaaaaaaaaaaaaaaaaaaaaaaaaaaaaa

SEQ ID NO: 2071 - DNA, 698 bp, Homo sapiens
gccctggcccaggctgcacgtgcaggacctcctggtggccggagcctccacagcagtgcagtggcagccacctacaagtatgtgaacatgcaggatcccgagatggacatgaagtcagtgactgaccgggcagcccgcaccctgctgtggactgagctcttccgaggcctgggcatgaccctgagctacctgttccgggaaccggccaccatcaactacccgttcgagaagggcccgctgagccctcgcttccgtggggagcatgcgctgcgccggtacccatccggggaggagcgttgcattgcctgcaagctctgcgaggccatctgccccgcccaggccatcaccatcgaggctgagccaagagctgatggcagccgccggaccacccgctatgacatcgacatgaccaagtgcatctactgcggcttctgccaggaggcctgtcccgtggatgccatcgtcgagggccccaactttgagttctccacggagacccatgaggagctgctgtacaacaaggagaagttgctcaacaacggggacaagtgggaggccgagatcgccgccaacatccaggctgactacttgtatcggtgacgccccaccggcctgcagcccctgctgcccaataaaaccactccgaccccaaaaaaaaaaaaaaaaaaaaaaaaaaaaaaaaaaaaaaaaaaaaaaaa

SEQ ID NO: 2072 - DNA, 2134 bp, Homo sapiens
ggccgccagtgtgctggaattcggctttacggctgcgagaagacgacagaagggcgaagaacgcaaagctgagaacatggacgttaatatcgccccactccgcgcctgggacgatttcttcccgggttccgatcgctttgcccggccggacttcagggacatttccaaatggaacaaccgcgtagtgagcaacctgctctattaccagaccaactacctggtggtggctgccatgatgatttccattgtggggtttctgagtcccttcaacatgatcctgggaggaatcgtggtggtgctggtgttcacagggtttgtgtgggcagcccacaataaagacgtccttcgccggatgaagaagcgctaccccacgacgttcgttatggtggtcatgttggcgagctatttccttatctccatgtttggaggagtcatggtctttgtgtttggcattacttttcctttgctgttgatgtttatccatgcatcgttgagacttcggaacctcaagaacaaactggagaataaaatggaaggaataggtttgaagaggacaccgatgggcattgtcctggatgccctagaacagcaggaagaaggcatcaacagactcactgactatatcagcaaagtgaaggaataaacataacttacctgagctagggttgcagcagaaattgagttgcagcttgcccttgtccagacctatkttctgcttgcgtttttgaaacaggaggtgcacgtaccacccaattatctatggcagcatgcatgtataggccgaactattatcagctctgatgtttcagagagaagacctcagaaaccgaaagaaaaccaccaccctcctattgtgtctgaagtttcacgtgtgtttatgaaatctaatgggaaatggatcacacgatttctttaagggaattaaaaaaaataaaagaattacggcttttacagcaacaatacgattatcttataggaaaaaaaaaatcattgtaaagtatcaagacaatacgagtaaatgaaaaggctgttaaagtagatgacatcatgtgttagcctgttcctaatcccctagaattgtaatgtgtgggatataaattagtttttattattctcttaaaaatcaaagatgatctctatcactttgccacctgtttgatgtgcagtggaaactggttaagccagttgttcatacttcstttacaaatataaagatagctgtttaggatattttgttacatttttgtaaatttttgaaatgctagtaatgtgttttcaccagcaagtatttgttgcaaacttaatgtcattttccttaagatggttacagctatgtaacctgtattattctggacggacttattaaaatacaaacagacaaaaaataaaacaaaacttgagttctatttaccttgcacattttttgttgttacagtgaaaaaaatggtccaagaaaatgtttgccatttttgcattgtttcgtttttaactggaacatttagaaagaaggaaatgaatgtgcattttattaattccttaggggcacaaggaggacaataatagctgatcttttgaaatttgaaaaacgtctttagatgaccaagcaaaaagactttaaaaaatggtaatgaaaatggaatgcagctactgcagctaataaaaaattttagatagcaattgttacaaccatatgcctttatagctagacattagaattatgatagcatgagtttatacattctattatttttcctccctttctcatgtttttataaataggtaataaaaaatgttttgcctgccaattgaatgatttcgtagctgaagtagaaacatttaggtttctgtagcattaaattgtgaagacaactggagtggtacttactgaagaaactctctgtatgtcctagaataagaagcaatgatgtgctgcttctgatttttcttgcattttaaattctcagccaacctacagccatgatctttagcacagtgatatcaccatgacttcacagacatggtctagaatctgtacccttacccacatatgaagaataaaattgattaaaggtttttttggtgagactttaaaaaaaaaaaaaaaaaaaaaaaaaaaaaaaaaaagggcggccgc

SEQ ID NO: 2073 - DNA, 820 bp, Homo sapiens
  misc_feature (17)..(17): n equals a,t,g, or c
  misc_feature (26)..(26): n equals a,t,g, or c
  misc_feature (31)..(31): n equals a,t,g, or c
  misc_feature (126)..(126): n equals a,t,g, or c
  misc_feature (131)..(131): n equals a,t,g, or c
  misc_feature (796)..(796): n equals a,t,g, or c
taagttaagggttccancagaaattnagttncagctttgcccttgtcccagacctatgttcgcttgcgtttttgaaccagaaggtgcacgtccacccaattatctatgccagcatgcatgtatagnccganctattatcagctctgatgtttcagagagaagcctcagaaccgaaagaaaaccaccaccctcctattgtgtctgaagtttcacgtgtgtttatgaaatctaatgggaaatggatcacacgatttctttaagggaattaaaaaaaataaaagaattacggcttttacagcaacaatacgattatcttataggaaaaaaaaaatcattgtaaagtatcaagacaatacgagtaaatgaaaaggctgttaaagtagatgacatcatgtgttagcctgttcctaatcccctagaattgtaatgtgtgggatataaattagtttttattattctcttaaaaatcaaagatgatctctatcactttgccacctgtttgatgtgcagtggaaactggttaagccagttgttcatacttcctttacaaatataaagatagctgtttaggatattttgttacatttttgtaaatttttgaaatgctagtaatgtgttttcaccagcaagtatttgttgcaaacttaatgtcattttccttaagatggttacagctatgtaacctgtattattctggacggacttattaaaatacaaacagwcaaaaaawaaaamaaaaaaaaaaaarwagggcggccgctctagaggatccckcgaggggcccaagcgywttccngtargttccccttaaagacccccg

SEQ ID NO: 2074 - DNA, 628 bp, Homo sapiens
ccttccaggtaccggtccggaattcccgggttgaacccacgcgtccggatggccttgacaccagcagggtgacatccgctattgctacttctctgctcccccacagttcctctggacttctctggaccacagtcctctgccagacccctgccagaccccagtccaccatgatccatctgggtcacatcctcttcctgcttttgctcccagtggctgcagctcagacgactccaggagagagatcatcactccctgccttttaccctggcacttcaggctcttgttccggatgtgggtccctctctctgccgctcctggcaggcctcgtggctgctgatgcggtggcatcgctgctcatcgtgggggcggtgttcctgtgcgcacgcccacgccgcagccccgcccaagatggcaaagtctacatcaacatgccaggcaggggctgaccctcctgcagcttggacctttgacttctgaccctctcatcctggatggtgtgtggtggcacaggaacccccgccccaacttttggattgtaataaaacaattgaaacaccaaaaaaaaaaaaaaaaaaaaaaaaaaaaaaaaaaaaaaaaaaaaaaaaaaaaaaaaaaaaaaaaaaactcg

SEQ ID NO: 2075 - DNA, 932 bp, Homo sapiens
  misc_feature (546)..(546): n equals a,t,g, or c
  misc_feature (599)..(599): n equals a,t,g, or c
  misc_feature (792)..(792): n equals a,t,g, or c
  misc_feature (879)..(879): n equals a,t,g, or c
cccacgcgtccgcccacgcgtssgtttttttgtgcaagatttaataaaaaacaaacaaaaataggaatggttgctttcaacattttccaggttgtgaaaggtttgccacgactctcaggggtgtggttctaagctgcatcagtggaacaaatacaaaatgctgtcctcctcctgggctggaaggcagtgcactttctcctcttaacagccagactagcgggtgaggagtcagtgctgtgacccaggccaagctggagtgtccgcatagctttttctctgaccagtggggattccatctaccttgaggcgtgctggctgggccccgtttccacaccagcacatggtgagacagggtagcttatcaacscccccccccccccccccccccccccccccccccccccccccccccccccccccccccccccccccccccccccccccccaattctaaatgaatcccaccaaaaaatcaaattaagaaaataacttgcagcggacatagaatatgatgtggcatatgctgcttcctgggagccccacttnacccgcctgccaccctgaaagattttcttccaccgccggcgggggcccctttngacacgtttaagccggctactcctggacttgaccctaaagctcgacttctgctcgattatctatgatctattagtaggatattcagcgcgtcttggaagccttccccttctttcccttccttgcgcccagctgacgctccccacgatgaatcgcccactaggctacgcctagttaggcggctcgcgacggctntagccataactggcggagctcgctataactgatgggatcattcgcgatggcgaccccaccgatgcggcaccggatacttatcctggnttccccaactcgctaaaagcttttgcagattagagaggaggaatgggatgact

SEQ ID NO: 2076 - DNA, 901 bp, Homo sapiens
  misc_feature (834)..(834): n equals a,t,g, or c
  misc_feature (845)..(845): n equals a,t,g, or c
  misc_feature (894)..(894): n equals a,t,g, or c
tcgagtttttttttttttttttttttttttttttttttgaggtcactgggttttatttgagtccagaggggaaggcgttgactcccacccaggcccgagtgccctgaggctggaggagggaggcaggatggcagcacagagcaagggcttcctgccctcctggctgcctgcagacgggagtggagaccgtcagagcaagccccagcttctttcagaggagggtagagtccaggactagagctcttctcttgtggctgacaccttctctgagcaggccccctggggtcccccacatagcaatgcctccagagcccctcggccttgttggtgggcttcatagatctggtcttctccaaactcccccaagtagtgcaaacatgtcctggagagcctggtaggccaggggccccctgtgaccatcacgctgatgcttggctctggcccctcgctaagtcctgggcctgtgagacgtttcacttggtccacttctcgaactccgtagtcctgccagttccgggagcagctccggtccaggacatccgtgtagaccaactcgctcagctcccgccgccccccagagtttgaggtatgaagtttggtctctgcctttgccagattttgccacatctggtaagccacagctctgcaggcatcacagcgcaggtgagcgggcatgtgggctgagtacatctcctcatcatccagttgtggggctgtggctgtgagtggcgccctgtccccgaggccccctgggatggcccaggctcccagcagcagcagcagcagtggcagtgacagcctcatggccccaggagccagttcagcctcgtgccnaattyctgcanccccggggggaacccacttaggttctaagagccggcccggcaaccggcngtgggaa

SEQ ID NO: 2077 - DNA, 327 bp, Homo sapiens
  misc_feature (266)..(266): n equals a,t,g, or c
  misc_feature (305)..(305): n equals a,t,g, or c
  misc_feature (309)..(309): n equals a,t,g, or c
ggagattcccactcagccgctcacacaacacacacactcctctaggactctggtccaagggaggggctggctgggatgaagtctgggctctggagctgagagcaagtgggagagcagagggccagtggacaaggtcaccttgtgaccttggggccaggggctttccctctctgaattccacaaatgcccagcatgtccagcttgctgtggagatgggtctctccctggctgggctcctgccaaaactgtactcctctcctctccantgccaccagctacggattcgagaatggaccaagtgaaangctncacaaggcccaggactta

SEQ ID NO: 2078 - DNA, 607 bp, Homo sapiens
  misc_feature (46)..(46): n equals a,t,g, or c
gcgagggcccaagccaagcatcagcgtgatggtcacagggggcccntggcctaccaggtgatgcccggggcttggggataggatgaagctcctggagccttggtttgccccactgtgggctgggcagcatctgaggctcctgctgggctcccctaggctctccaggacatgtttgcactacttgggggagtttggagaagaccagatctatgaagcccaccaacaaggccgaggggctctggaggcattgctatgtgggggaccccagggggcctgctcagagaaggtgtcagccacaagagaagagctctagtcctggactctaccctcctctgaaagaagctggggcttgctctgatggtctccactcccgtctgcaggcagccaggagggcaggaagcccttgctctgtgctgccatcctgcctccctcctccagcctcagggcactcgggcctgggtgggagtcaactccttcccctctggactcaaataaaacccagtgacctcacttcttttctctgcaaaaggtgcttgtggggctgggagtgcagacattggtgtttctgctgatgtcccttgtgaaaaaaaaaaaaaaaaaactcgag

SEQ ID NO: 2079 - DNA, 859 bp, Homo sapiens
tttttttttttttttttttttttttttttttttttttttttttttttttttttttttttttttttttttttttttttttttttgaggtcactgggttttatttgagtccagaggggaaggcgttgactcccacccaggcccgagtgccctgaggctggaggagggaggcaggatggcagcacagagcaagggcttcctgccctcctggctgcctgcagacgggagtggagaccgtcagagcaagccccagcttctttcagaggagggtagagtccaggactagagctcttctcttgtggctgacaccttctctgagcaggccccctggggtcccccacatagcaatgcctccagagcccctcggccttgttggtgggcttcatagatctggtcttctccaaactcccccaagtagtgcaaacatgtcctggagagcctggtaggccaggggccccctgtgaccatcacgctgatgcttggctctggcccctcgctaagtcctgggcctgtgagacgtttcacttggtccacttctcgaactccgtagtcctgccagttccgggagcagctccggtccaggacatccgtgtagaccaactcgctcagctcccgccgccccccagagtttgaggtatgaagtttggtctctgcctttgccagattttgccacatctggtaagccacagctctgcaggcatcacagcgcaggtgagcgggcatgtgggctgagtacatctcctcatcatccagttgtggggctgtggctgtgagtggcgccctgtccccgaggccccctgggatggcccaggctcccagcagcagcagcagcagtggcagtgacagcctcatggccccagga

SEQ ID NO: 2080 - DNA, 819 bp, Homo sapiens
ttttttttttttttttttttttttttttttttttttttgaggtcactgggttttatttgagtccagaggggaaggcgttgactcccacccaggcccgagtgccctgaggctggaggagggaggcaggatggcagcacagagcaagggcttcctgccctcctggctgcctgcagacgggagtggagaccgtcagagcaagccccagcttctttcagaggagggtagagtccaggactagagctcttctcttgtggctgacaccttctctgagcaggccccctggggtcccccacatagcaatgcctccagagcccctcggccttgttggtgggcttcatagatctggtcttctccaaactcccccaagtagtgcaaacatgtcctggagagcctggtaggccaggggccccctgtgaccatcacgctgatgcttggctctggcccctcgctaagtcctgggcctgtgagacgtttcacttggtccacttctcgaactccgtagtcctgccagttccgggagcagctccggtccaggacatccgtgtagaccaactcgctcagctcccgccgccccccagagtttgaggtatgaagtttggtctctgcctttgccagattttgccacatctggtaagccacagctctgcaggcatcacagcgcaggtgagcgggcatgtgggctgagtacatctcctcatcatccagttgtggggctgtggctgtgagtggcgccctgtccccgaggccccctgggatggcccaggctcccagcagcagcagcagcagtggcagtgacagcctcatggccccaggagccag

SEQ ID NO: 2081 - DNA, 532 bp, Homo sapiens
  misc_feature (1)..(1): n equals a,t,g, or c
  misc_feature (22)..(22): n equals a,t,g, or c
  misc_feature (220)..(220): n equals a,t,g, or c
nctgcaggaattcggccacgantgggcagtgtgggctccagactaggtcaggcctgtggagccggactctgtgttcaatgctggcatttatgtgcgtgcttgtggtcttgctgaccacatgtcaagctattctgtctacattcaagacaggagcaagggggaaggtgaagtgccagggtctcctgctcctttttcaagaaaatgataggctgggcgcggnggctcacgcctgtaatcctcccaaagtgctggtattacaggcgtgagcagtgcgtctggcccgaccctgtctttactaaaaatggcaagaccctgtctctactaaaaatacaaagaaaccccaaactagtcaggtgtggtggtacattcttgtgtcccagctacttgggaggctaaggtaggaggatcacctgagccttgaaggtcaaagctgtagtgagctgagatcgtgtccattgcattccagcctaggcaaccagagcaagaccctatctcacaaaaaaaaaaaaaaaaaaaaaaaactcgggggggg

SEQ ID NO: 2082 - DNA, 198 bp, Homo sapiens
  misc_feature (66)..(66): n equals a,t,g, or c
tctagaactagtggatcccccggctgcaggaattcggcacgaggtgggcagtgtgggctcccagantaggtcaggcctgtggagccggactctgtgttcaatgctggcatttatgtgcgtgcttgtggtcttgctgaccacatgtcaagctattctgtctacattcaagacaggagcaagggggaaggtgaagtgcca

SEQ ID NO: 2083 - DNA, 945 bp, Homo sapiens
gactgttactcccttgaatttataaacaaggaggctcaaagagctgaagattaaagagatgaagtatctaggctaaggtcacagagctagcaaatgacatatgctagatctaagcccaagtctgactctaaaattctgctttcttcatttagtttttctgccattcaaagtttactgccagctcctccaggaacttctgagtaagcctgtctccaaattgcccctaactcctcagtgccagtcatgggccaggcccctgggggacttggaatgagtaaaacatgcacctattgttaaggttcacctggtccagaagggaggcagacccacctgcccaccatgacccggacagaggcgataaatacggagcacctcatggccagggcctggaggattcccaccataccctacccagcgccaataacagagggaccctggagttgtgtacacaagatagcagttcagtgcttgcacacatactagttgagaagggaaatcagggctaatgaaacagctcaactgtctggcagagccaggctccttctgccatgatacagtttggatgtttgtccctttctaatcttatatggaaatttgatccccagtgttgaaggtggggcctggtgggagatgttcctgttatcgggatggatccttcatgaatagcctggtgccatctttgtggtaacaagtgagttctcacttgattagtttctgtgagaactgtttgttaaaaagagcctggtggcacctccctcccttcttcctccttctcttgctatgtgatgctgctgccctttgccttccgtcatgagtggaagctccctgaagcccccaccagaagcaaatgctggcaccatgctgcttgtacagcctgcagaactgtgagccaaataaacctcttttctttataaattaaaaaaaaaaaaaaaaaaaaaactcgta

SEQ ID NO: 2084 - DNA, 1267 bp, Homo sapiens
gttgtcacccagttcataarctgacattgccttaaatgtccctttttaaccccttatccctattttctaccattattactccggctcatgcccctttcatctcttgcttagacttctatagtgattttctaattggttgcttttattctagtcttaagccctctcatccatcctttactctcctaccagaggtatctttatgaaatgcaaattagctgtaagtcatcagtgacttaaatagagataaaatctaaacaacttagggtaacatttgagatctagcccctgttgatctctgtagcctcttcactcattctgtccattcaggaccagttaaccatccatgccatgcttcttgcagttctcttaatgtacatattgatcatttttttctttcctttgatcctggtgatttytcagccaggggtactgcacagcctacctacytggtacatctatatacttcttttccaaaatttgttttcaatgtcacatgttctctggagcctttcctaacttccctccagtgtggtcaaagtgaactactcaccccacctttttaaaatctccattgtactctagtgtataaatgtttctcctggaacatgttatccttatttgtttaaatctctccctctctctaagccttgatgtctttttttttaaaaaaatgtattgaatatatactttgtgccctgcactatgctaagtgttcttcatttatttatatcatttacatttgcagttgccctgtgaggtgaggtagatattayccccagatgaagatgtcagagaagttaactgccctaagttatatcattactaagtaccagagttacgatttgagccmagaatgttggactgacacctaagtctatgcgtttactgaatccacagtactgcctttgtacgtcttatgcctgttacattgtattcagaaaacatttgttaaatgactggaagaaagcttggcgggtcttttttgcatggccttttcgctgtcttgtgtgtgcctctccctggctccaaggacagttctggttagtatatgatcagatcatagtaacagtttgtcacctgacttactgaccaaggactcgtgattgtagagaactcttaggaggctgacctgatgctcaagtttctgcttctcacatgataatttgtggtagaggtaggaagacaagaagagactgagtaatagtagaaagagagaaacacaaaaaaagcaaacaacaaaaaccaaaaaaaaaaaaaaaaaactcga

SEQ ID NO: 2085 - DNA, 1614 bp, Homo sapiens
cccacgcktccgctccagttaggagccttgatgccggaggggacagtgggtcgccgagagcgcccggagggaaccgcctggccttcggggaccaccaattttgtctggaaccaccctcccggcgtatcctactccctgtgccgcgaggccatcgcttcactggaggggtcgatttgtgtgtagtttggtgacaagatttgcattcacctggcccaaaccctttttgtctctttgggtgaccggaaaactccacctcaagttttcttttgtggggctgccccccaagtgtcgtttgttttactgtagggtctcccgcccggcgcccccagtgttttctgagggcggaaatggccaattcgggcctgcagttgctgggcttctccatggccctgctgggctgggtgggtctggtggcctgcaccgccatcccgcagtggcagatgagctcctatgcgggtgacaacatcatcacggcccaggccatgtacaaggggctgtggatggactgcgtcacgcagagcacggggatgatgagctgcaaaatgtacgactcggtgctcgccctgtccgcggccttgcaggccactcgagccctaatggtggtctccctggtgctgggcttcctggccatgtttgtggccacgatgggcatgaagtgcacgcgctgtgggggagacgacaaagtgaagaaggcccgtatagccatgggtggaggcataattttcatcgtggcaggtcttgccgccttggtagcttgctcctggtatggccatcagattgtcacagacttttataaccctttgatccctaccaacattaagtaagtctgggaaccctgcctcctaaggggacaggtctggggtcctggaatagggaggagggcagaggcacgccagggtttctaaccacccccttccctaccaacattaagtatgagtttggccctgccatctttattggctgggcagggtctgccctagtcatcctgggaggtgcactgctctcctgttcctgtcctgggaatgagagcaaggctgggtaccgtgcaccccgctcttaccctaagtccaactcttccaaggagtatgtgtgacctgggatctccttgccccagcctgacaggctatgggagtgtctagatgcctgaaagggcctggggctgagctcagcctgtgggcagggtgccggacaaaggcctcctggtcactctgtccctgcactccatgtatagtcctcttgggttgggggtgggggggtgccgttggtgggagagacaaaaagagggagagtgtgctttttgtacagtaataaaaaataagtattgggaagcaggcttttttcccttcagggcctctgctttcctcccgtccagatccttgcagggagcttggaaccttagtgcacctacttcagttcagaacacttagcaccccactgactccactgacaattgactaaaagatgcaggtgctcgtatctcgacattcattcccacccccctcttatttaaatagctaccaaagtacttcttttttaataaaaaaataaagatttttattaggtaaaaaaaaaaaaaaamaaaaaaaaaaaaaaaaaaaaaaaaaaaaaaaaaaa

SEQ ID NO: 2086 - DNA, 730 bp, Homo sapiens
  misc_feature (665)..(665): n equals a,t,g, or c
  misc_feature (690)..(690): n equals a,t,g, or c
  misc_feature (694)..(694): n equals a,t,g, or c
  misc_feature (718)..(718): n equals a,t,g, or c
  misc_feature (722)..(722): n equals a,t,g, or c
cagaattcggcacgagcggcgccggacagaagaggtccagcggttagtgggcgcggccggcggcacgaaggctggagccgcctgcatttccagcaatgacggcgccctttcccctcgcccgcagcggccttgcaggccactcgagccctaatggtggtctccctggtgctgggcttcctggccatgtttgtggccacgatgggcatgaagtgcacgcgctgtgggggagacgacaaagtgaagaaggcccgtatagccatgggtggaggcataattttcatcgtggcaggtcttgccgccttggtagcttgctcctggtatggccatcagattgtcacagacttttataaccctttgatccctaccaacattaagtaagtctgggaaccctgcctcctaaggggacaggtctggggtcctggaatagggaggagggcagaggcacgccagggtttctaaccacccccttctcttcacaggtatgagtttggccctgccatctttattggctgggcagggtctgccctagtcatcctgggaggtgcactgctctcctgttcctgtcctgggaatgagagcaaggctgggtaccgtgtaccccgctcttaccctaagtccaactcttccaaggagtatgtgkgacctgggaatctcctttgccccanccttgacaaggcttatgggaatggnctanatgccttgaaaagggccctggggncttnagcttcaa

SEQ ID NO: 2087 - DNA, 1745 bp, Homo sapiens
atcatggataccagtactacaatggcaagatcatgtctgtgtctatagcccgtagatgaggtgtggcggttagtctgtcagaggcatagaggcggattgtggaggtagggtgattagggaatagggatagtagggtcagtgctcgagtaaggatttcttcaagaagttcttatatgagccattgccagtataatctcacctggaccactgtatgcatgaccacttcaatgctgagatcgtcaccaagaccattgagaacaagcaggatgctgtggactacctcacctggacctttctgtaccgccgcatgacacagaaccccaattactacaacctgcagggcatctcccatcgtcacttgtcggaccacttgtcagagctggtggagcagaccctgagtgacctggagcagtccaagtgcatcagcatcgaggacgagatggacgtggcgcctctgaacctaggcatgatcgccgcctactattacatcaactacaccaccattgagctcttcagcatgtccctcaatgccaagaccaaggtgcgagggcttatcgagatcatctccaatgcagcagagtatgagaacattcccatccggcaccatgaagacaatctcctgaggcagttggctcagaaggtcccccacaagctgaataaccctaagttcaatgatccgcacgtcaagaccaacctgctcctgcaggctcacttgtctcgcatgcagctgagtgctgagttgcagtcagatacggaggaaatccttagtaaggcaatccggctcatccaggcctgcgtggatgtcctttccagcaatgggtggctcagccctgctctggcagctatggaactggcccagatggtcacccaagccatgtggtccaaggactcatacctgaagcagctgccacacttcacctctgagcatatcaaacgttgcacagacaagggagtggagagtgttttcgacatcatggagatggaggatgaagaacggaacgcgttgcttcagctgactgacagccagattgcagatgtggctcgcttttgtaaccgctaccctaatatcgaactatcttatgaggtggtagataaggacagcatccgcagtggcgggccagttgtggtgctggtgcagctggagcgagaggaggaagtcacaggccctgtcattgcgcctctcttcccgcagaaacgtgaagagggctggtgggtggtgattggagatgccaagtccaatagcctcatctccatcaagaggctgaccttgcagcagaaggccaaggtgaagttggactttgtggccccagccactggtgcccacaactacactctgtacttcatgagtgacgcttacatgggatgtgaccaggagtacaaattcagcgtggatgtgaaagaagctgagacagacagtgattcagattgagtcctgaggcatttacttttgggtaaaggagagttgagcctgaattaggaatgtgtacattgtaggaatcctggttgtggggaccaggtctgtgggcctcaggtctggccagccagggctggtgctgtccccgcctacctccacttcctttcccttgctcactctggatccagtgacagcaggtgtcatgggtcaagcataaatcatatatagcattttcaggcatgttcctggtagttcttttgagtctgacattctaataaaataatttgtagaaaccaaaaaaaaaaaaaaagggcggccgctcgcgatctac

SEQ ID NO: 2088 - DNA, 1134 bp, Homo sapiens
ggcacgagcggcgccggacagaagaggtccagcggttagtgggcgcggccggcggcacgaaggctggagccgcctgcatttccagcaatgacggcgccctttcccctcgcccgcagcggccttgcaggccactcgagccctaatggtggtctccctggtgctgggcttcctggccatgtttgtggccacgatgggcatgaagtgcacgcgctgtgggggagacgacaaagtgaagaaggcccgtatagccatgggtggaggcataattttcatcgtggcaggtcttgccgccttggtagcttgctcctggtatggccatcagattgtcacagacttttataaccctttgatccctaccaacattaagtaagtctgggaaccctgcctcctaaggggacaggtctggggtcctggaatagggaggagggcagaggcacgccagggtttctaaccacccccttctcttcacaggtatgagtttggccctgccatctttattggctgggcagggtctgccctagtcatcctgggaggtgcactgctctcctgttcctgtcctgggaatgagagcaaggctgggtaccgtgtaccccgctcttaccctaagtccaactcttccaaggagtatgtgtgacctgggatctccttgccccagcctgacaggctatgggagtgtctagatgcctgaaagggcctggggctgagctcagcctgtgggcagggtgccggacaaaggcctcctggtcactctgtccctgcactccatgtatagtcctcttgggttgggggtgggggggtgccgttggtgggagagacaaaaagagggagagtgtgctttttgtacagtaataaaaaataagtattgggaagcaggcttttttcccttcagggcctctgctttcctcccgtccagatccttgcagggagcttggaaccttagtgcacctacttcagttcagaacacttagcaccccactgactccactgacaattgactaaaagatgcaggtgctcgtatctcgacattcattcccacccccctcttatttaaatagctaccaaagtacttcttttttaataaaaaaataaagatttttattaggtaaaaaaaaaaaaaaaaaaaaaaaaaaaaaa

SEQ ID NO: 2089 - DNA, 640 bp, Homo sapiens
caaagccctacatctaagccagagagagacagggcagctggggccgggctctcagccagtgagatggccagccccctcctgctgccacaccacgtaagttctcagtcccaacctcggggatgtgtgcagacagggctgtgtgaccacagctgggccctgttccctctggacctcggtctcctcatctgtgagatgctgtggcccagctgacgagccctaacgtccccagaaccgagtgcctatgaggacagtgtccgccctgccctccgcaacgtgcagtccctgggcacggcgggccctgccatgtgctggtaacgcatgcctgggccctgctgggctctcccactccaggcggaccctgggggccagtgaaggaagctcccggaaagagcagagggagagcgggtaggcggctgtgtgactctagtcttggccccaggaagcgaaggaacaaaagaaactggaaaggaagatgctttaggaacatgttttgcttttttaaaatatatatatatttataagagatcctttcccatttattctgggaagatgtttttcaaactcagagacaaggactttggtttttgtaagacaaacgatgatatgaaggccttttgtaagaaaaaaaaaaaaaaaaaag

SEQ ID NO: 2090 - DNA, 1134 bp, Homo sapiens; identical to SEQ ID NO: 2088

SEQ ID NO: 2091 - DNA, 756 bp, Homo sapiens; identical to SEQ ID NO: 1365
  misc_feature (16)..(16): n equals a,t,g, or c
  misc_feature (22)..(22): n equals a,t,g, or c
  misc_feature (36)..(36): n equals a,t,g, or c
  misc_feature (51)..(52): n equals a,t,g, or c
  misc_feature (57)..(58): n equals a,t,g, or c

SEQ ID NO: 2092 - DNA, 807 bp, Homo sapiens
  misc_feature (22)..(22): n equals a,t,g, or c
  misc_feature (807)..(807): n equals a,t,g, or c
gtccccgctcagatccaggccncgaatgggctgggcgggttgcagaagccatcacctgagctacccagggtgggatccctggccccgacctctgtcctgacacgccccaagcggcagcaacaaagccccaattggcctgggcctgggcaggaggagctgggccgggtgccagatactgggatcagccactgcagctccctgagcactctctacagagacgcggaccccagacatgaggaggctcctcctggtcaccagcctggtggttgtgctgctgtgggaggcaggtgcagtcccagcacccaaggtccctatcaagatgcaagtcaaacactggccctcagagcaggacccagagaaggcctggggcgcccgtgtggtggagcctccggagaaggacgaccagctggtggtgctgttccctgtccagaagccgaaactcttgaccaccgaggagaagccacgaggtcagggcaggggccccatccttccaggcaccaaggcctggatggagaccgaggacaccctgggccgtgtcctgagtcccgagcccgaccatgacagcctgtaccaccctccgcctgaggaggaccagggcgaggagaggccccggttgtgggtgatgccaaatcaccaggtgctcctgggaccggaggaagaccaagaccacatctaccacccccagtagggctccaggggccatcactgcccccgccctgtcccaaggcccaggctgttgggactgggaccctccctaccctgccccagctagacaaataaaccccagcaggccgggcaaaaaaaaan

SEQ ID NO: 2093 - DNA, 639 bp, Homo sapiens
cacgagtgcagctccctgagcactctctacagagacgcggaccccagacatgaggaggctcctcctggtcaccagcctggtggttgtgctgctgtgggaggcaggtgcagtcccagcacccaaggtccctatcaagatgcaagtcaaacactggccctcagagcaggacccagagaaggcctggggcgcccgtgtggtggagcctccggagaaggacgaccagctggtggtgctgttccctgtccagaagccgaaactcttgaccaccgaggagaagccacgaggtcagggcaggggccccatccttccaggcaccaaggcctggatggagaccgaggacaccctgggccgtgtcctgagtcccgagcccgaccatgacagcctgtaccaccctccgcctgaggaggaccagggcgaggagaggccccggttgtgggtgatgccaaatcaccaggtgctcctgggaccggaggaagaccaagaccacatctaccacccccagtagggctccaggggccatcactgcccccgccctgtcccaaggcccaggcgttgggactgggaccctccctaccctgccccagctagacaaataaaccccagcaggccgggaaaaaaaaaaaaaaaaaaaaaaaaaaa

SEQ ID NO: 2094 - DNA, 1716 bp, Homo sapiens
acctctgtccttagaggggactggaacctaattctcctgagcctgagggagggtggagggtctcaagacaacgctgtccccacgacggagtgccaggarcactaacagtacccttagmttgctttcctcctccctccttttttawtttcaagttcctttttatttctccttgcgtaacaaccttcttcccttctgcaccactgcccgtacccttacccgcsccgccacctccttgctaccccactcttgaaaccacagctgttggcagggtccccagctcatgccagcctcatctcctttcttgctagcccccaaagggcctccaggcaacatggggggcccagtcagagagccggcactctcagttgccctctggttgagttggggggcagctctgggggccgtggcttgtgccatggctctgctgacccaacaaacagagctgcagagcctcaggagagaggtgagccggctgcaggggacaggaggcccctcccagaatggggaagggtatccctggcagagtctcccggagcagagttccgatgccctggaagcctgggagartggggagagatcccggaaaaggagagcagtgctcacccaaaaacagaagaagcagcactctgtcctgcacctggttcccattaacgccacctccaaggatgactccgatgtgacagaggtgatgtggcaaccagctcttaggcgtgggagaggcctacaggcccaaggatatggtgtccgaatccaggatgctggagtttatctgctgtatagccaggtcctgtttcaagacgtgactttcaccatgggtcaggtggtgtctcgagaaggccaaggaaggcaggagactctattccgatgtataagaagtatgccctcccacccggaccgggcctacaacagctgctatagcgcaggtgtcttccatttacaccaaggggatattctgagtgtcataattccccgggcaagggcgaaacttaacctctctccacatggaaccttcctggggtttgtgaaactgtgattgtgttataaaaagtggctcccagcttggaagaccagggtgggtacatactggagacagccaagagctgagtatataaaggagagggaatgtgcaggaacagaggcgtcttcctgggtttggctccccgttcctcacttttcccttttcattcccaccccctagactttgattttacggatatcttgcttctgttccccatggagctccgaattcttgcgtgtgtgtagatgaggggcgggggacgggcgccaggcattgtccagacctggtcggggcccactggaagcatccagaacagcaccaccatctagcggccgctctagaggatccctcgaggggcccaagcttacgcgtgcatgcgacgtcatagctctctccctatagtgagtcgtattataagctagcttgggatctttgtgaaggaaccttacttctgtggtgtgacataattggacaaactacctacagagatttaaagctctaaggtaaatataaaatttttaagtgtataatgtgttaaactagctgcatatgcttgctgcttgagagtttggcttactgagtatgattatgaaaatattatwcacaggagstagtgatctatgttggttttagatcaagccaaggtcattcaggcctcagctcaagctgtcatgatcatatcagcatacaattgtgag

SEQ ID NO: 2095 - DNA, 610 bp, Homo sapiens
  misc_feature (10)..(10): n equals a,t,g, or c
  misc_feature (47)..(47): n equals a,t,g, or c
  misc_feature (49)..(49): n equals a,t,g, or c
caaggttccntgggactggcaccccaagggtttggctcaaactcccnanaagccatgctggcctcaagtgcmattctgggtcctcccgcmaagccmagaccctccgcagggagcttgtgggctagagcaacaggcagagctgggacttgagcaaggaagtaagtgacagctcttgatctcagaaagaaaggggatggagatgtcccctagtatcaccccatcatttgaaatttagagaaggttgtcctgtaagtagctcgacagacctgacccacctcaaacagtgccccagtgggtggcaggacctctgatggagcggatgagtgtctgagaacctcagaatgtaataaatggtctaataggtttgttaggacactacaatggcacagaagagcagcccctagccccgctgtatatctccatttttttcaaaataaggagaataatattttgcaggcaacaaaatcatgggacaaagttggcaaatgttctaaaaacagaaattggattagtgaatcacatcacaggactactgttccaggttagatacaaagcacaataatttggttttgatttttgtcattgttgtttgttgttttgagacagggcc

SEQ ID NO: 2096 - DNA, 604 bp, Homo sapiens
  misc_feature (3)..(3): n equals a,t,g, or c
  misc_feature (31)..(31): n equals a,t,g, or c
  misc_feature (33)..(33): n equals a,t,g, or c
  misc_feature (572)..(572): n equals a,t,g, or c
  misc_feature (581)..(581): n equals a,t,g, or c
  misc_feature (603)..(603): n equals a,t,g, or c
ttnacgcggccagggttttaaaggaattccnanaggggggatygsgascggccsccctttttttttttttttgaaaagcaaagtatcccttttattataatttctttttacataaccttttcaacctatattcaggtaactacctgtctctcccatgaaaggagaagggtcctgcacattacaacaggcaaaaaaggcttttaagaaataaaatattttaaattgatccattacatttgttcaattttcttgagtacattggaaagtgggaaaaacacaaaaggagaaaaaaatggtatttcaaacaaccagactataataatcttagttagattggtagtacactcattatactttttccccaaacaggtacaaaggaggttcaagtgctctatgtggatgctagtctatacctcgatatttttattttactcccagtactcccacggccatggccagtgtttgcctaaattctctgaagcatatcaaggagtctcagttacgcaaaacaaccttgggcaaccacaaagaagagggatgcacatctcccagaaatattaaataggtgtggntcactcaanagaaacagagaagcgtaaactna

SEQ ID NO: 2097 - DNA, 3105 bp, Homo sapiens
  misc_feature (19)..(19): n equals a,t,g, or c
  misc_feature (56)..(56): n equals a,t,g, or c
  misc_feature (88)..(88): n equals a,t,g, or c
  misc_feature (92)..(92): n equals a,t,g, or c
  misc_feature (136)..(136): n equals a,t,g, or c
  misc_feature (418)..(418): n equals a,t,g, or c
gttgaatatcccgctgaangggccggccggatcaactctgcggacatggagtttcnggtcgattcgcttgttccctcctgttaggccnctgngttttagtttaaaggtgaaagcttatgcaacatgctcagcaggngcttcatcaacgatatatgtcagatctaaaggtatattttcatcctgtaattatgttacataaaagcaatgtaaatcagaataaatatgttagaccagaataaaattaattatattctggtcttcaaagaacacacagaacagatatcagcagaatcacttaatacttcatagaacaaaaatcactcaaaacctgtttataaccaaagaattcatgaaaaagaaagccctttgccatttgtcttagaaagttatttttttaaaaaaaatcatacttactatnagtatctatggaagtatatgtaacaatttttatgtaaaggtcatctttctgtgatagtgaaaaaatatgtctttactaagttgaaatgaatactttctgcctttgctmatgatagttattctacaatctccacaagaaaaatataccttttatccggaaatattggtttaaggcaaataaataaaactgtgcttgctctaaagctctgcactacaaaagcaaattttccagtctttattccactcataaccactgctttccccaccaggctaaagtgcttcttagtcttaaatagggtttttaacttcataaggtacaccattgtttatgttttagggtgcaggtccatatagtcgtaatacttaaaacactgctacactgatgcttttgtggctcatggtttcctggttctttgatttaacacctggcttcctggtatctatggctggttaaatatctaaacctgcattattagtgctttacaataataattcccttgactgaagtccagaaatactaaagcacttcttttttattgctgtgaatgccttagacttatcttccaaaataggatacttcgtttctattgcatatataactgaaatattttataaactcactgtaatcaaatcttataaaatctgaatcaacatgaaaagttgtcaatgcttgaatgaatactaaaatcataccacaagatactagataacataaatgaccatgaagtgtcccactgctcaaagggcaacaactttaagaacagaagcaaagagtggtggtgtggaacccaagattcttggcgactagggaatttaaaggttggggaggaggaattcaatgatttgacaagaaatactttataaaaatttgctccatgtattggctaagaaaaatataataaaattttggtagtgaaaattgtatcactaatgtttaccaatattactagtatgaataatacacataaggtagtgacttggaagctgctcaatactttgttgctataacaaaatgcaatattttgttgtaaagcatcttaactacacatataagtttgctgaacttgaatacatcccggtaatggcaaacttcattttattcttggttttcattttattctggtctcagggccatacatttattttagtttaattaattattattttgacaacattacttgggtaatatctatataatggtagataaccaatcagttagcttaattaatctaaactatttgaattcagggaaatattagtcaaatctgctgtttgactaaatacaattcaaagcagtgtatttgtgacttggaatatagaacacaaacaaatgtgtaacccatctgcagtatgcattcttccattttaccaccactaaccattgaggctcatacaattttcaagcaacaagcattgcttcccaaaggtaaaataatcaggaatatttctatagtaaatggagtttttaattggcaatactgtttatttttttctagcaaagacaatttatctcagtaaccttaaataggaaaagtactcaaaaattaaagttgacttttggctttttgtagtctctctggaggacttccagaaaattaccactgttggattttaatctgcttccattaaccaatcttacagagatgataaatgaattaactaatattgaccaaatataaattgactgcaaataataagccgcataaaagttgaagtaggaaaactactccaagtttatatattaggcaccttggggaattctcttagtctttccagctaacaaggattttcagcataataagtagatttaatgatggcataaaattcccagatactttcatatacattttttgccaaagtgtaaatcttctccttttgcagtctttttgttattatcccaacatctagctgctcaggccctaatttagaactcattctgatattttcttcttctgtattaattaatacttatgggtcatgaatccctgctcctttgacctttttaatagctcatgaatccatcccattgcctccccaactctgcccacacctgctgcaacagctaatgccttgattttcctacctcagtctccttttctattaatccctcttttgcgtggctgcctgagtccactttctcaaacacaaacctcactatgcaactttggaatctctgtaggctcacctttgccatttcttaatattgcattctccaaattgctaatctctatccagtctcttgaactagacttggcacatggagattccgctcagaaagtgctcttcacacttctacctgcttgactaaccccagattatctttcaagactttaatctgatcttgtgtcttagagaagcccccatacctggtagagcatgtaccatcttacatgcttaaataactccacatttatttgtgtttattactctgtgttataaatatacatttgttggtctctctcttggattattttgtttctttgtcctgtaactaccactgaaagggtgcaatacagctttcttgaaatgtgtattgaacggatgaatgtataaataaaaattaaattttgtaaatttctgcttattcttagaaaaagaatctaaattgtgacaaatcagaattgaaaaaagtattctaataaagaaaaacaagcttttataamaaaaaaaaaaaaaaaaagggcggcc

SEQ ID NO: 2098 - DNA, 437 bp, Homo sapiens
gaaataaaataaaaaataaaattcccaatccaagatataaaacagttatttttgtttccttctatagcttttatggtgtaatatatatatatatattttgtttagacttttaatgcacctggaattttttctggtgtgaggtgtgaaatagagattcaacgtagtttttctctagatggatatttggttatctattccattattcagtctgtccactcatatagcagtgtcactctgttttaagtattgtagatttataatgttttactacctgatatggctactccctgcccctgccccatcttgcccctcatttttgtggtggtggtttttatccccccaaaatattgtagctagttttgcttgtcttccattcatttatctattcattcatcaaaaacccactatgggaaaaaaaaaaaaaaaaaagggcggcc

SEQ ID NO: 2099 - DNA, 1852 bp, Homo sapiens
  misc_feature (1829)..(1829): n equals a,t,g, or c
  misc_feature (1843)..(1843): n equals a,t,g, or c
gggccagctgcagagcttgtggaggccatggggcgcgtcgtcgcggagctcgtctcctcgctgctggggttgtggctgttgctgtgcagctgcggatgccccgagggcgccgagctgcgtgctccgccagataaaatcgcgattattggagccggaattggtggcacttcagcagcctattacctgcggcagaaatttgggaaagatgtgaagatagacctgtttgaaagagaagaggtcgggggccgcctggctaccatgatggtgcaggggcaagaatacgaggcaggaggttctgtcatccatcctttaaatctgcacatgaaacgttttgtcaaagacctgggtctctctgctgttcaggcctctggtggcctactggggatatataatggagagactctggtatttgaggagagcaactggttcataattaacgtgattaaattagtttggcgctatggatttcaatccctccgtatgcacatgtgggtagaggacgtgttagacaagttcatgaggatctaccgctaccagtctcatgactatgccttcagtagtgtcgaaaaattacttcatgctctaggaggagatgacttccttggaatgcttaatcgaacacttcttgaaaccttgcaaaaggccggcttttctgagaagttcctcaatgaaatgattgctcctgttatgagggtcaattatggccaaagcacggacatcaatgcctttgtgggggcggtgtcactgtcctgttctgattctggcctttgggcagtagaaggtggcaataaacttgtttgctcagggcttctgcaggcatccaaaagcaatcttatatctggctcagtaatgtacatcgaggagaaaacaaagaccaagtacacaggaaatccaacaaagatgtatgaagtggtctaccaaattggaactgagactcgttcagacttctatgacatcgtcttggtggccactccgttgaatcgaaaaatgtcgaatattacttttctcaactttgatcctccaattgaggaattccatcaatattatcaacatatagtgacaactttagttaagggggaattgaatacatctatctttagctctagacccatagataaatttggccttaatacagttttaaccactgataattcagatttgttcattaacagtattgggattgtgccctctgtgagagaaaaggaagatcctgagccatcaacagatggaacatatgtttggaagatcttttcccaagaaactcttactaaagcacaaattttaaagctctttctgtcctatgattatgctgtgaagaagccatggcttgcatatcctcactataagcccccggagaaatgcccctctatcattctccatgatcgactttattacctcaatggcatagagtgtgcagcaagtgccatggagatgagtgccattgcagcccacaacgctgcactccttgcctatcaccgctggaacgggcacacagacatgattgatcaggatggcttatatgagaaacttaaaactgaactatgaagtgacacactcctttttcccctcctagttccaaatgactatcagtggcaaaaaagaacaaaatctgagcagagatgattttgaaccagatattttgccattatcattgtttaataaaagtaatccctgctggtcataggaaaacacacggttctaattaagtgtgaaggtatagctattgcacttatgccatctccaaaatttcttaagtattctttcactatccattaggagtttttcttaaacttgtctgatawtargawtcaccgggagttagggaggtnggtgggttgccgtnaggcccatt

SEQ ID NO: 2100 - DNA, 424 bp, Homo sapiens
  misc_feature (29)..(29): n equals a,t,g, or c
  misc_feature (339)..(339): n equals a,t,g, or c
ttgccgtcgtagcggactggtcatacccncggaggaggcgcccgtcgggccccaggtcgcagccatacatcctctggagggtgtgagaccctggccccgcccccgcggtcagcccagtcccccgagccccgccccgccccgaccaacccgcggggattttggcctaaaccgaaaatgaaaccgggtaaaggcgactggggctctctccggtcgagggtctgggcgggttccgcagatccaccttggggtggatctcagacggggagactcggggcgacccgggccgtccgtgggggatggggaggggtcgtgacctgcgccccgggccggggtcactcnccgtcctcgctctggttgtagtagccgcgcaggttccgcaggctcactcggtcagcctgtgcctggcgcttgtagttctgtgtct

SEQ ID NO: 2101 - DNA, 1704 bp, Homo sapiens
tttttttttttttttgaccagcagggattacttttattaaacaatgataatggcaaaatatctggttcaaaatcatctctgctcagattttgttcttttttgccactgatagtcatttggaactaggaggggaaaaaggagtgtgtcacttcatagttcagttttaagtttctcatataagccatcctgatcaatcatgtctgtgtgcccgttccagcggtgataggcaaggagtgcagcgttgtgggctgcaatggcactcatctccatggcacttgctgcacactctatgccattgaggtaataaagtcgatcatggagaatgatagaggggcatttctccgggggcttatagtgaggatatgcaagccatggcttcttcacagcataatcataggacagaaagagctttaaaatttgtgctttagtaagagtttcttgggaaaagatcttccaaacatatgttccatctgttgatggctcaggatcttccttttctctcacagagggcacaatcccaatactgttaatgaacaaatctgaattatcagtggttaaaactgtattaaggccaaatttatctatgggtctagagctaaagatagatgtattcaattcccccttaactaaagttgtcactatatgttgataatattgatggaattcctcaattggaggatcaaagttgagaaaagtaatattcgacatttttcgattcaacggagtggccaccaagacgatgtcatagaagtctgaacgagtctcagttccaatttggtagaccacttcatacatctttgttggatttcctgtgtacttggtctttgttttctcctcgatgtacattactgagccagatataagattgcttttggatgcctgcagaagccctgagcaaacaagtttattgccaccttctactgcccaaaggccagaatcagaacaggacagtgacaccgccccacaaaggcattgatgtccgtgctttggccataattgaccctcataacaggagcaatcatttcattgaggaacttctcagaaaagccggccttttgcaaggtttcaagaagtgttcgattaagcattccaaggaagtcatctcctcctagagcatgaagtaatttttcgacactactgaaggcatagtcatgagactggtagcggtagatcctcatgaacttgtctaacacgtcctctacccacatgtgcatacggagggattgaaatccatagcgccaaactaatttaatcacgttaattatgaaccagttgctctcctcaaataccagagtctctccattatatatccccagtaggccaccagaggcctgaacagcagagagacccaggtctttgacaaaacgtttcatgtgcagatttaaaggatggatgacagaacctcctgcctcgtattcttgcccctgcaccatcatggtagccaggcggcccccgacctcttctctttcaaacaggtctatcttcacatctttcccaaatttctgccgcaggtaataggctgctgaagtgccaccaattccggctccaataatcgcgattttatctggcggagcacgcagctcggcgccctcggggcatccgcagctgcacagcaacagccacaaccccagcagcgaggagacgagctccgcgacgacgcgccccatggcctccacaagctctgcagctggcccggacgcgtgg

SEQ ID NO: 2102 - DNA, 972 bp, Homo sapiens
  misc_feature (938)..(939): n equals a,t,g, or c
  misc_feature (953)..(953): n equals a,t,g, or c
  misc_feature (955)..(955): n equals a,t,g, or c
ggcacaaactatgaagaccctaaggctaagaaagaacactgtgaaattttcattatatagacattttaaaaatactctgatctttgctgtgctggcttctatagtgtttatggggtggacaactaagacatttagaattgcaaaatgccaatcagattggatggaacgctgggttgacgatgcattttggagcttccttttttcgcttatccttattgtaatcatgtttttgtggagaccatcagcaaacaatcagagatatgccttcatgcccttaatagatgattctgatgatgaaattgaggaattcatggtaacttctgaaaatttaaccgaaggaataaaattaagagcctcaaaatcagtttccaatggaacagctaagcctgccacttctgagaactttgatgaagatttgaagtgggtagaagaaaatattccctcttcattcacagatgtagctcttccagtgttagtggattcagatgaggaaatcatgaccagatctgaaatggctgaaaaaatgttctcttcagaaaagataatgtgattggaacccgtataagaaatgtagttaagcctgaaggactatccttcatcaagactgaaagtgagctttgatttgatattgcctaaaaatttttattgtgttatcttggaagtctgtgtatcaaaatgaagaattcagatggtaggaggttctatagtccttttaaagctgactcttgagtgtcagttgaatatccattaaattggatttggaaataacctgaggaaagtattatgataaagatctgcacagatgcctcttagctgataggtggcaggcctgtgggtttgggttctccctcttttctctggaacatatgacaattccagattaaagaaaaatgttttttaataaaaaaaaaaaaaaaaaaaaaaactcgagggggggnncagaacccaaatcnanaaatagtgagtcgaaaa

SEQ ID NO: 2103 - DNA, 1088 bp, Homo sapiens
cggacgcgtggggaacttgtagtccttgaggccccttccctaggtccttcgagctactccgtctggccccgccttttctctgctctcctgaacctttaggcttgtctcggcccatttgaagaccaggaagttgatcaatcccgaggctgctgagagacggtggcgcgattgggacagtcgccagggatggctgagcgtgaagatgcagcgggtgtccgggctgctctcctggacgctgagcagagtcctgtggctctccggcctctctgagccgggagctgcccggcagccccggatcatggaagagaaagcgctagaggtttatgatttgattagaactatccgggacccagaaaagcccaatactttagaagaactggaagtggtctcggaaagttgtgtggaagttcaggagataaatgaagaagaatatctggttattatcaggttcacgccaacagtacctcattgctctttggcgactcttattgggctgtgcttaagagtaaaacttcagcgatgtttaccatttaaacataagttggaaatctacatttctgaaggaacccactcaacagaagaagacatcaataagcagataaatgacaaagagcgagtggcagctgcaatggaaaaccccaacttacgggaaattgtggaacagtgtgtccttgaacctgactgatagctgttttaagagccactggcctgtaattgtttgatatatttgtttaaactctttgtataatgtcagagactcatgtttaatacataggtgatttgtacctcagagcattttttaaaggattctttccaagcgagatttaattataaggtagtacctaatttgttcaatgtataacattctcaggatttgtaacacttaaatgatcagacagaataatattttctagttattatgtgtaagatgagttgctatttttctgatgctcattctgatacaactatttttcgtgtcaaatatctactgtgcccaaatgtactcaatttaaatcattactctgtaaaataaataagcagatgattcttaaaaaaaaaaaaaaaaaaaaaaaaaaaagggcggccgc

SEQ ID NO: 2104 - DNA, 1443 bp, Homo sapiens
acgcgtccgaaaatactctgatctttgctgtgctggcttctatagtgtttatggggtggacaactaagacatttagaattgcaaaatgccaatcagattggatggaacgctgggttgacgatgcattttggagcttccttttttcgcttatcccttattgtaatcatgtttttgtggagaccatcagcaaacaatcagagatatgccttcatgcccttaatagatgattctgatgatgaaattgaggaattcatggtaacttctgaaaatttaaccgaaggaataaaattaagagcctcaaaatcagtttccaatggaacagctaagcctgccacttctgagaactttgatgaagatttgaagtgggtagaagaaaatattccctcttcatcacagatgtagctcttccagtgttagtgggattcagatgaggaaatcatgaccagatctgaaatggctgaaaaaatgttctcttcagaaaagataatgtgattgaacccgtataaaaaatgtagttaagcctgaaggactatccttcatcaagactgaaagtgagctttgatttgatattgcctaaaaatttttattgtgttatcttggaagtctgtgtatcaaaatgaagaattcagatggtaggaggttctatagtccttttaaagctgactcttgagtgtcagttgaatatccattaaattggatttggaaataacctgaggaaagtattatgataaagatctgcacaggatgcctcttagctgataggtgagcaggcctgtgggtttgggttctccctcttttctctggaacatatgacaattccagattaaagaaaaatgttttttaataaatacccttggtctttcttctagtcacctttgaggtagatattgtgattttctgggagtatagtatatccgtgtctctgtgtcttaggtttactagatgcaataatacttctctttgacatttgtactgaaagtgatttggatattaagtaaaacagttaatgtttgaatataggcatatttataggttttttccgctcccccccaacccaccctttttaaaaaatctatacaaagcccttgtttgaagtctcatcatgcacatcaaatcattggaagttaggtcttctctgagctcaggggaacacaagtgcacagagagagatgtcttgagggtcactaccaaagaattaccctcattgtccctcactcaggccatgtgtacatgcgatgctgctgagtgtgctggggtgggtggtggccacgtggctcccccagagcacttcctaactggcaagctgggagacccattactggtgaactttgtggaaattagaactgtattttttacataatcttggcatattacatttcataataaaaacatacatttagttgcatgctaaaaaaaaaaaaaaaaaaaaaaaaaaaaaaaaaa

SEQ ID NO: 2105 - DNA, 1690 bp, Homo sapiens
  misc_feature (1665)..(1667): n equals a,t,g, or c
  misc_feature (1671)..(1687): n equals a,t,g, or c
cgcttgccccgggggtctgtcgcgtcgcaggcgccgccggagccctggccatgaggaccctgtggatggcgctgtgcgcgctgtcgcggctgtggcccggggcccaggccggctgcgccgaggccgggcgctgctgtcccggccgggaccccgcctgcttcgcccgcggctggaggctggacagggtctacgggacgtgtttctgcgaccaagcctgtcgcctcaccggggactgctgcttcgactacgacagggcgtgcccagctcgcccgtgcttcgtgggggaatggagcccctggagtggttgtgcagaccagtgcaagcctacaacccgtgtgcggaggcgctcggtgcagcaggagcctcagaacggcggggcgccctgcccacccctggaagagagagctggctgcctggagtactccaccccgcagggccaggactgcgggcacacctatgttcctgcctttataactacctctgcattcaacaaggagagaacacgacaagctacgtctccacactggtctacacacacagaggatgctggatactgtatggagtttaagacagagtccttgactcctcactgtgctctggaaaaccggcccttgactagatggatgcagtatctccgagagggatacacggtgtgtgtggattgtcagcctccagctatgaactctgtgagccttcgttgttctggagatggcctggactccgatggaaatcagactctccattggcaagcaattggtaatcctcggtgtcaaggaacttggaaaaaagttcggcgagtagaccagtgttcttgtccagctgttcacagttttatttttatatagatggtgatataaatatttccaaatgcatttgtaaacattctaaatattctcaagtcatgttcaatgtttcctaaaccttcaattttggccaaagtccccaaacacatcattgccacactctgaagtagagaaagaaaatttaggggccagttctcaaggaacacaggtcctttatttttattttaactaagttgaagacccactcaaaaagctcttgtggttttatgttcttgacctttcaactggagtcctctcattcagcaggtggcccgtgagacacagaatacatgtctgtttgctaaagtaaaattactgtaactcagtccgattattggtgacggaagtgtcatttaaggggatctatgttttgaaccttgcagtctattttataatcttttaaaagtttctcactttaaaacatgtatacaggtatgcacactctacacatatatttccatatatttaatattccataaattctgaaataatttcaagcaaattatcacaaataatttttccacagggcaaattatttaaaattttagtaagcattctgtaatgaaaaaccaagttatactaaaaacattttttgaagaagaaattttttttttgcttaagaagtgaaaggatcaaatgctcattgtaggtcaatgggagttcttttaaatgttataattttcatgaaaagaaatgttgacaccagtgaatgaaacaattgctttcattctgaaaattctaccaccatttgcatctaagattatttccaaggcttaaagcctgaagctgaataaaataatctttcagagtccagcttcaaaannnaaannnnnnnnnnnnnnnnnaag

SEQ ID NO: 2106 - DNA, 1700 bp, Homo sapiens
ccacgcgtccgcgcttgccccgggggtctgtcgcgtcgcaggcgccgccggagccctggccatgaggaccctgtggatggcgctgtgcgcgctgtcgcggctgtggcccggggcccaggccggctgcgccgaggccgggcgctgctgtcccggccgggaccccgcctgcttcgcccgcggctggaggctggacagggtctacgggacgtgtttctgcgaccaagcctgtcgcctcaccggggactgctgcttcgactacgacagggcgtgcccagctcgcccgtgcttcgtgggggaatggagcccctggagtggttgtgcagaccagtgcaagcctacaacccgtgtgcggaggcgctcggtgcagcaggagcctcagaacggcggggcgccctgcccacccctggaagagagagctggctgcctggagtactccaccccgcagggccaggactgcgggcacacctatgttcctgcctttataactacctctgcattcaacaaggagagaacacgacaagctacgtctccacactggtctacacacacagaggatgctggatactgtatggagtttaagacagagtccttgactcctcactgtgctctggaaaaccggcccttgactagatggatgcagtatctccgagagggatacacggtgtgtgtggattgtcagcctccagctatgaactctgtgagccttcgttgttctggagatggcctggactccgatggaaatcagactctccattggcaagcaattggtaatcctcggtgtcaaggaacttggaaaaaagttcggcgagtagaccagtgttcttgtccagctgttcacagttttatttttatatagatggtgatataaatatttccaaatgcatttgtaaacattctaaatattctcaagtcatgttcaatgtttcctaaaccttcaattttggccaaagtccccaaacacatcattgccacactctgaagtagagaaagaaaatttaggggccagttctcaaggaacacaggtcctttatttttattttaactaagttgaagacccactcaaaaagctcttgtggttttatgttcttgacctttcaactggagtcctctcattcagcaggtggcccgtgagacacagaatacatgtctgtttgctaaagtaaaattactgtaactcagtccgattattggtgacggaagtgtcatttaaggggatctatgttttgaaccttgcagtctattttataatcttttaaaagtttctcactttaaaacatgtatacaggtatgcacactctacacatatatttccatatatttaatattccataaattctgaaataatttcaagcaaattatcacaaataatttttccacagggcaaattatttaaaattttagtaagcattctgtaatgaaaaaccaagttatactaaaaacattttttgaagaagaaattttttttttgcttaagaagtgaaaggatcaaatgctcattgtaggtcaatgggagttcttttaaatgttataattttcatgaaaagaaatgttgacaccagtgaatgaaacaattgctttcattctgaaaattctaccaccatttgcatctaagattatttccaaggcttaaagcctgaagctgaataaaataatctttcagagtccagcttcaaaaaaaaaaaaaaaaaaaaaaaaaaaaa

SEQ ID NO: 2107 - DNA, 2101 bp, Homo sapiens
  misc_feature (6)..(6): n equals a,t,g, or c
  misc_feature (12)..(12): n equals a,t,g, or c
ggacgntggggnccgtcgccttcggagcgaaggtaccgacccggcagaagctcggagctctyggggtatcgaggaggcaggcccgcgggcgcacgggcgascgggccgggagccggagcggcggaggagccggcagcagcggcgcggcgggctccaggcgcggcgggctccaggcgaggcggtcgacgctcctgaaaacttgcgcgcgcgctcgcgccactgcgcccggagcgatgaagatggtcgcgccctggacgcggttctactccaacagctgctgcttgtgctgccatgtccgcaccggcaccatcctgctcggcgtctggtatctgatcatcaatgctgtggtactgttgattttattgagtgccctggctgatccggatcagtataacttttcaagttctgaactgggaggtgactttgagttcatggatgatgccaacatgtgcattgccattgcgatttctcttctcatgatcctgatatgtgctatggctacttacggagcgtacaagcaacgcgcagcctggatcatcccattcttctgttaccagatctttgactttgccctgaacatgttggttgcaatcactgtgcttatttatccaaactccattcaggaatacatacggcaactgcctcctaattttccctacagagatgatgtcatgtcagtgaatcctacctgtttggtccttattattcttctgtttattagcattatcttgacttttaagggttacttgattagctgtgtttggaactgctaccgatacatcaatggtaggaactcctctgatgtcctggtttatgttaccagcaatgacactacggtgctgctacccccgtatgatgatgccactgtgaatggtgctgccaaggagccaccgccaccttacgtgtctgcctaagccttcaagtgggcggagctgagggcagcagcttgactttgcagacatctgagcaatagttctgttatttcacttttgccatgagcctctctgagcttgtttgttgctgaaatgctactttttaaaatttagatgttagattgaaaactgtagttttcaacatatgctttgctrgaacactgtgatagattaactgtagaattcttcctgtacgattggggatataaygggcttcactaaccttccctaggcattgaaacttcccccaaatctgatggacctagaagtctgcttttgtacctgctgggccccaaagttgggcatttttctctctgttccctctcttttgaaaatgtaaaataaaaccaaaaatagacaactttttcttcagccattccagcatagagaacaaaaccttatggaaacaggaatgtcaattgtgtaatcattgttctaattaggtaaatagaagtccttatgtatgtgttacaagaatttcccccacaacatcctttatgactgaagttcaatgacagtttgtgtttggtggtaaaggattttctccatggcctgaattaagaccattagaaagcaccaggccgtgggagcagtgaccatctgctgactgttcttgtggatcttgtgtccagggacatggggtgacatgcctcgtatgtgttagagggtggaatggatgtgtttggcgctgcatgggatctggtgcccctcttctcctggattcacatccccacccagggcccgcttttactaagtgttctgccctagattggttcaaggaggtcatccaactgactttatcaagtggaattgggatatatttgatatacttctgcctaacaacatggaaaagggttttcttttccctgcaagctacatcctactgctttgaacttccaagtatgtctagtcaccttttaaaatgtaaacattttcagaaaaatgaggattgccttccttgtatgcgctttttaccttgactacctgaattgcaagggatttttatatattcatatgttacaaagtcagcaactctcctgttggttcattattgaatgtgctgtaaattaagtcgtttgcaattaaaacaaggtttgcccacaaaaaaaaaaaaaaaaaaaaaaaaaaaagtcgacgcggccgcgaatttagtagtagtaggcggccgc

SEQ ID NO: 2108 - DNA, 1379 bp, Homo sapiens
  misc_feature (1322)..(1322): n equals a,t,g, or c
  misc_feature (1360)..(1360): n equals a,t,g, or c
  misc_feature (1373)..(1373): n equals a,t,g, or c
ccgccgctgcagcggtcgccttcggagcgaagggtaccgacccggcagaagctcggagctctcggggtatcgaggaggcaggcccgcgggcgcacgggcgagcgggccgggagccggagcggcggaggagccggcagcagcggcgcggcgggctccaggcgaggcggtcgacgctcctgaaaacttgcgcgcgcgctcgcgccactgcgcccggagcgatgaagatggtcgcgccctggacgcggttctactccaacagctgctgcttgtgctgccatgtccgcaccggcaccatcctgctcggcgtctggtatctgatcatcaatgctgtggtactgttgattttattgagtgccctggctgatccggatcagtataacttttcaagttctgaactgggaggtgactttgagttcatggatgatgccaacatgtgcattgccattgcgatttctcttctcatgatcctgatatgtgctatggctacttacggagcgtacaagcaacgcgcagcctggatcatcccattcttctgttaccagatctttgactttgccctgaacatgttggttgcaatcactgtgcttatttatccaaactccattcaggaatacatacggcaactgcctcctaattttccctacagagatgatgtcatgtcagtgaatcctacctgtttggtccttattattcttctgtttattagcattatcttgacttttaagggttacttgattagctgtgttkggaactgctaccgatacatcaatggtaggaactcctctgatgtcctggtttatgttaccagcaatgacactacggtgctgctacccccgtatgatgatgccactgtgaatggtgctgccaaggagccaccgccaccttacgtgtctgcctaagccttcaagtgggcggagtgagggcagcagcttgactttgcagacatctgagcaatagttctgttatttcacttttgccatgagcctctctgagcttgtttgttgctgaaatgctactttttaaaatttagatgttagattgaaaactgtagttttcaacatatgctttgctrgaacactgtgatagattaactgtagaattcttcctgtacgattggggatataaygggcttcactaaccttccctaggcattgaaacttcccccaaatctgatggacctagaagtctgcttttgtacctgctgggccccaaagttgggcattttctctctgttccctctcttttgaaaagtaaawtaaaccaaaatagacacttttcctcagccatccagcatgagaccaaaccttatggaacaggaatgnaatgtgaatcattgtctaataggtaatgaagcctaggntgggtcaagattncccaaa

SEQ ID NO: 2109 - DNA, 1487 bp, Homo sapiens
gggtcgacccacgcgtccgaaactccattcaggaatacatacggcaactgcctcctaattttccctacagagatgatgtcatgtcagtgaatcctacctgtttggtccttattattcttctgtttattagcattatcttgacttttaagggttacttgattagctgtgtttggaactgctaccgatacatcaatggtaggaactcctctgatgtcctggtttatgttaccagcaatgacactacggtgctgctacccccgtatgatgatgccactgtgaatggtgctgccaaggagccaccgccaccttacgtgtctgcctaagccttcaagtgggcggagctgagggcagcagcttgactttgcagacatctgagcaatagttctgttatttcacttttgccatgagcctctctgagcttgtttgttgctgaaatgctactttttaaaatttagatgttagattgaaaactgtagttttcaacatatgctttgctggaacactgtgatagattaactgtagaattcttcctgtacgattggggatataatgggcttcactaaccttccctaggcattgaaacttcccccaaatctgatggacctagaagtctgcttttgtacctgctgggccccaaagttgggcatttttctctctgttccctctcttttgaaaatgtaaaataaaaccaaaaatagacaactttttcttcagccattccagcatagagaacaaaaccttatggaaacaggaatgtcaattgtgtaatcattgttctaattaggtaaatagaagtccttatgtatgtgttacaagaatttcccccacaacatcctttatgactgaagttcaatgacagtttgtgtttggtggtaaaggattttctccatggcctgaattaagaccattagaaagcaccaggccgtgggagcagtgaccatctgctgactgttcttgtggatcttgtgtccagggacatggggtgacatgcctcgtatgtgttagagggtggaatggatgtgtttggcgctgcatgggatctggtgcccctcttctcctggattcacatccccacccagggcccgcttttactaagtgttctgccctagattggttcaaggaggtcatccaactgacttttatcaagtggaattgggatatttgatatacttctgcctaacaacatggaaaagggttttcttttccctgcaagctacatcctactgctttgaacttccaagtatgtctagtcaccttttaaaatgtaaacattttcagaaaaatgaggattgccttccttgtatgcgctttttaccttgactacctgaattgcaagggatttttatatattcatatgttacaaagtcagcaactctcctgttggttcattattgaatgtgctgtaaattaagttgtttgcaattaaaacaaggtttgcccacatccaaaaaaaaaaaaaaaaaaaaaaaaaaaaaaaaaaaaaaaaa

SEQ ID NO: 2110 - DNA, 1625 bp, Homo sapiens
gcgtccgcggacgcgtgggcgcggccggagaaccccgcaatctttgcgcccacaaaatacaccgacgatgcccgatctactttaagggctgaaacccacgggcctgagagactataagagcgttccctaccgccatggaacaacggggacagaacgccccggccgcttcgggggcccggaaaaggcacggcccaggacccagggaggcgcggggagccaggcctgggccccgggtccccaagacccttgtgctcgttgtcgccgcggtcctgctgttggtctcagctgagtctgctctgatcacccaacaagacctagctccccagcagagagcggccccacaacaaaagaggtccagcccctcagagggattgtgtccacctggacaccatatctcagaagacggtagagattgcatctcctgcaaatatggacaggactatagcactcactggaatgacctccttttctgcttgcgctgcaccaggtgtgattcaggtgaagtggagctaagtccctgcaccacgaccagaaacacagtgtgtcagtgcgaagaaggcaccttccgggaagaagattctcctgagatgtgccggaagtgccgcacagggtgtcccagagggatggtcaaggtcggtgattgtacaccctggagtgacatcgaatgtgtccacaaagaatcaggcatcatcataggagtcacagttgcagccgtagtcttgattgtggctgtgtttgtttgcaagtctttactgtggaagaaagtccttccttacctgaaaggcatctgctcaggtggtggtggggaccctgagcgtgtggacagaagctcacaacgacctggggctgaggacaatgtcctcaatgagatcgtgagtatcttgcagcccacccaggtccctgagcaggaaatggaagtccaggagccagcagagccaacaggtgtcaacatgttgtcccccggggagtcagagcatctgctggaaccggcagaagctgaaaggtctcagaggaggaggctgctggttccagcaaatgaaggtgatcccactgagactctgagacagtgcttcgatgactttgcagacttggtgccctttgactcctgggagccgctcatgaggaagttgggcctcatggacaatgagataaaggtggctaaagctgaggcagcgggccacagggacaccttgtacacgatgctgataaagtgggtcaacaaaaccgggcgagatgcctctgtccacaccctgctggatgccttggagacgctgggagagagacttgccaagcagaagattgaggaccacttgttgagctctggaaagttcatgtatctagaaggtaatgcagactctgccatgtcctaagttttatttttttcaggaagtgagaccttccctggtttaccttttttttggaaaaagcccaactggactccagtcagtaggaaagtgccacaattgtcacatgaccggtactggaagaaactctcccatccaacatcacccagtggatggaacatcctgtaacttttcactgcacttggcattatttttataagctgaatgtgataataaggacactatggaaaaaaaaaaaaaaaaaaaaaaaaaaaaaaaaaa

SEQ ID NO: 2111 - DNA, 1027 bp, Homo sapiens
ccctgacatccggtaccttacaggcctggatgacggtcgagaatatcgatctcaaaaccattggtttcttctctctggtaggccaggcttacgtttttaaattcctctggtcaccgctgatggaccgctacacgcctccattttttgggcggcggcgcggttggctgctcgccacgcaaatcctgttattagtcgccattgcggcgatgggttttctcgaaccaggcacccaactccgctggatggcggcgctggcagtggtgatcgctttttgctctgcttcccaggatatagtcttcgatgcgtggaaaaccgatgtgcttccggcagaagaacgtggtgcgggcgcggcaatcagcgtgctgggttaccgtttagggatgctggtttccggcggcctagccctgtggctggcagataaatggctgggctggcagggcatgtactggttaatggcggcactgttgatcccctgtattatcgcgacgttgcttgcaccagaaccaaccgacaccattcctgtgcccaaaacgctggaacaagcggttgttgcacctctgcgagatttctttggtcgcaataatgcctggcttattttgcttcttatcgtgctgtataagctgggcgacgcattcgccatgagcctgacaaccacgtttttgattcgcggcgtcgggtttgatgcgggtgaagtaggcgtggttaacaaaacgcttggcttactagcgaccattgttggcgcattgtacggtgggattttgatgcagcgcctgtcactgttccgggcactgctgattttcggcattttacaaggtgcgtctaacgccggttactggctgctgtcgattactgataagcatctctacagcatgggcgcagccgtctttttcgaaaacctctgtggcgggatgggcacatcagcctttgtcgcgctgttaatgacgctatgtaataagtcattttccgctactcaatttgccctgctctcagcgctttctgctgtagggcgagtttatgtcggccccgt

SEQ ID NO: 2112 - DNA, 1728 bp, Homo sapiens
gcccacgcgtccgcttgtttgaagtttttgtctcctactcagcacactgcaagttgcacaggcccatgttttctattactgtcttttttttcttttttaaaaaatctgatgttggataactagataatcttaatcccccttctttattcctattgtccagcaatacatctctaacgttttcattaatgacgtgtatgtaatttttgctctgtttccctgatgccttgaaccattgtcatgtttagctcttatttctgctttgccacacatattcagactgtattaatcctcgccgtttctctcttctggggtaccacattaagaaagaaaagctaaagtgcaattataggtacccctggctatttttgaatttgcatttgtaactataccctctgatgtttattccgtgtttgtttggggtcgtacgctgtagcttatgcctgtaatcccagcacttttcgaggccaagatgggcagatcacttgagcccargacttcgagaccagtctgggcaacacggtgaaatcccatctcctcaaaaaatacaaaaaaaattagctgggcgtgatgatgtgcgcctgtattcctggmtactcaggaggctgaaatgggagaatcacctgagcctgggggaagttaagtctgcagcaagccctgatcaggccactgcactctggcctggacggcgkagtgagaccctgtctccaaaaaaaaaaaaaaaaaaaaaaggaagaaaaaagtttgtttggttctaggtctgttacatatgggtcctaaaaagaactatagagggttaaagtgagaaagccagtcgttggtgaatatgtctgtgtgtgcatagagttttaaacattatttagtgactgttttgtgccagctatggtatgagtaactggaaatataaagatgctgaaattgactatttaaaaacatttatgtatttatttatttttggagatgtggtctcactctgttgcccaggctggagtgcagtgacatgatcatagctcactgcagcctcaaactcctggactcaatcaatcttcccgccttagcctcccaggctgtgaggcaccacagatggctaattaaaaaaaactttttaaaatgtaaacctgaaaattgcctgagagtggattgcataatctaaaaatatgaaaatatgtataaatattttgtttcttaaaaggccactgctgtggtagcttatctagtatccttgctacatttactgaaaatatatgttagagatatctgcactgctatgttcttttcagcatttttcacaatagccaagatatggaaacaaccttaacgttcatcaatgaatgcataaagaaaatgtgatacatacgcacttgcaccatgaaatattattcagcattaaaaaagaagaaaatcctgccatttgcggcaacatggatgaacgtggaggacattatgctaagtgaagtaacgcagccatagaaagacaaatactgcatggaatctgaaaatatcaaacttacagagtagaatggtggttaccaggggctagggaaaggagtaaatggagagatgttgaaacttcaagtacaaagattcagttatgcaacataaataagttcggagatctaatgtacaacagtgtgactgtagttaatagtgtcatatactgtaattgacatttgtgaagagggtagaccttaaaagttcttaacacaccaaaaaaaaaaaaaaagggcggcc

SEQ ID NO: 2113 - DNA, 909 bp, Homo sapiens
tgactacgccsgctcgaaataaccctcactaaagggaacaaaagctggagctccaccgcggtggcggccgctctagaactagtggatcccccgggctgcaggaattcggcacgagcagaaacctccaattctcatgtggaagcccatgccctcaccctccaacatgaaagcctctgcagcacttctgtgtctgctgctcacagcagctgctttcagcccccaggggcttgctcagccagttgggattaatacttcaactacctgctgctacagatttatcaataagaaaatccctaagcagaggctggagagctacagaaggaccaccagtagccactgtccccgggaagctgtaatcttcaagaccaaactggacaaggagatctgtgctgaccccacacagaagtgggtccaggactttatgaagcacctggacaagaaaacccaaactccaaagctttgaacattcatgactgaactgaaaacaagccatgacttgagaaacaaataatttgtataccctgtcctttctcagagtggttctgagattattttaatctaattctaaggaatatgagctttatgtaataatgtgaatcatggtttttcttagtagattttaaaagttattaatattttaatttaatcttccatggattttggtgggttttgaacataaagccttggatgtatatgtcatctcagtgctgtaaaaactgtgggatgctcctcccttctctacctcatgggggtattgtataagtccttgcaagaatcagtgcaaagatttgctttaattgttaagatatgatgtccctatggaagcatattgttattatataattacatatttgcatatgtatgactcccaaattttcacataaaatagatttttgtataamaaaaaaa

SEQ ID NO: 2114 - DNA, 1088 bp, Homo sapiens
  misc_feature (1073)..(1073): n equals a,t,g, or c
  misc_feature (1083)..(1083): n equals a,t,g, or c
ctgcaggaattcggcacgagcctgatcctctcttttctgcagttcaagggaaagacgagatcttgcacaaggcactctgcttctgcccttggctggggaagggtggcatggagcctctccggctgctcatcttactctttgtcacagagctgtccggagcccacaacaccacagtgttccagggcgtggcgggccagtccctgcaggtgtcttgcccctatgactccatgaagcactgggggaggcgcaaggcctggtgccgccagctgggagagaagggcccatgccagcgtgtggtcagcacgcacaacttgtggctgctgtccttcctgaggaggtggaatgggagcacagccatcacagacgataccctgggtggcactctcaccattacgctgcggaatctacaaccccatgatgcgggtctctaccagtgccagagcctccatggcagtgaggctgacaccctcaggaaggtcctggtggaggtgctggcagaccccctggatcaccgggatgctggagatctctggttccccggggagtctgagagcttcgaggatgcccatgtggagcacagcatctccaggagcctcttggaaggagaaatccccttcccacccacttccatccttctcctcctggcctgcatctttctcatcaagattctagcagccagcgccctctgggctgcagcctggcatggacagaagccagggacacatccacccagtgaactggactgtggccatgacccagggtatcagctccaaactctgccagggctgagagacacgtgaaggaagatgatgggaggaaaagcccaggagaagtcccaccagggaccagcccagcctgcatacttgccacttggccaccaggactccttgttctgctctggcaagagactactctgcctgaacactgcttctcctggaccctggaagcagggactggttgagggagtggggaggtggtaagaacacctgacaacttctgaatattggacattttaaacacttacaaataaatccaagactgtcatatttaaaaaaaaaaaaaaaaaaaaaacncgaggggggncccgg

SEQ ID NO: 2115 - DNA, 1541 bp, Homo sapiens
taaagcggctccgtgacggagcggcggtgcgcgcggcagggcccggagtatcccgctttctttggaggaaaccaccgcatcagatctgcgctgcggcagaggcaggcaagtccctagcgtggaggggcagcatgctggcagcacttggggaggcggtgcgctaagggattcacgctgtaactgggaccgcagcagggaactacaatttccatagtgctccgcgccctcccagctggctctactgccggcgacggcgtggtacacgctgggatttgtagtcttacatggctttgcgcctcctacctggaaggcgggccagcgattggtaccagttcagacatgggtacacgttgacaggccgccggccgtcgactggcatgttgtgaccattcctggtgctggtcttggtactgttctttcctaccataacttattggaagagggtggcattcctgccttgcagccttttctccagtgaggagtgaacagtgggcacctgagatcctggcccacgctactatgctttcaggctacaaccactagcacggctgacgatggccctttctgcggagaccgagtcacacatctaccgagctctgcgtactgcttctggcgctgccgcccaccttgtggccctgggctttaccatctttgtggctgtgcttgccaggcctggctccattctccttcctgatgaccgaggcactactggtgttttctcctgagagttcgctgctgcactccctctcacggaaaggccgagcacgctgccactgggtgctgcagctgctggccctgctgtgtgcactgctgggcctcggccttgtcatcctccacaaagagcagcttggcaaagcccacctggttacgcggcatgggcaggcagggctgctggctgtgctgtgggcagggctgcagtgctcaggtggggtggggctgctctaccccaagctgctgccccgatggcccctggcgaagctcaagctataccatgctacttctgggctggtgggctacctgctgggtagtgccagcctcttgctgggcatgtgctcactctggttcactgcctctgtcactggtgcagcctggtacctggctgtattatgccctgtcctcaccagcttggtcattatgaaccaggtgagcaatgcctacctataccgcaagaggatccaaccatgagctcttcccagcctaggggaagcctggatttgcccctccatgtaggagctgggcctagggacctgttgaactctctcagctgagtcaggggacacctcaggcactgggacagttgggcatttggaggcccgtgtgtgaattcctgctcctcatgctggagtgcctcccatttccttcccctttctctgtcatcccagaggaacataggcatcatgtgtctggatgaagctggggctgcaagactgcctctcctgcaaggcagctcatacttgtactgtatgttcagaaattttaggagagaaaaaagtaaaaaatttgtaaaaaaaaaaaaaaaaaaaaaaaaaaaaaaaaaaaaa

SEQ ID NO: 2116 - DNA, 1390 bp, Homo sapiens
ccattcagggtgaacaacctggctttatcaataaagtcccgtataacttcctggaagtgaatatgcagggcatccaggtgtggcatttgagagaagtggttaataccacctataacctgtgggattacggctatggtgcattctggccggaaccgggctggggtgcgccttactacaccaatgcggtgagtcaggtaacacctgagctggtcaaataacaccaccgaaagatgcagatgctttctcagcatctgcatcatgcattacatcaaattaatacacagtaagctaactattattattataagccctgtcctgttaattacctttggcaaactgattataaagttaatgtccgcaccaggagtcggttatgtttcttataattaccagggatacgatgttcttcaccgcgatgaaaaacattctgagtaaaggtaatgtcgttcatatacagaacgaagaagagatcgacgtaatgttgcatcagaatgccttcgtcattattgatacattaatgaataatgtatwtcattctaatttwctcactcaaattgaacgattaaaacctgtccatgtcattattttctccccctttaatattaaacgctgcctggggaaagtgccggtgacctttgttccgcggactatcactatcattgattttgtcgcactcatcaatggcagttactgctctgtgcctgaagcggctgtgtcactttcgcgcaagmaacatcaggttctgagctgcattgcgaatcaaatgacaacggaagatattctggagaaactgaaaatatcgctaaaaacgttctactgccataaacacaatatcatgatgatcctcaatcttaagcggatcaatgagctggtacgccatcagcatattgattatctggtgtgaatttcaggcttacggtgagtctggtacgctgccacacagattagctaattgaaacgcctttcaccctgccataccttttaataatcgcaacaggtcttctatcgacgttgtggcatgaagctggatatcaatggcgaccacttcatgatcttcattttcctgcaacgaaactaaatcagtttttattttttgctgcttaaaccagtcgagcattgataccgtattaccgttcactaatgtcagctgtaaatggtaatttttgttcatcaggcggaaggttaattgatggaagacttccagcaccaacaaggtcatcactgaaccataaatacccagttcgtacataccgctgccaataaccatacctatggcggcggtcacccagatatccgctgccgtcgtcagacctacaatattttggttacgaacgagaatgttacctgcaccgataaacccgacgcccgtcaccacctgagcagcaatacg

SEQ ID NO: 2117 - DNA, 997 bp, Homo sapiens
agcggcgctgtttggttactcttccgcgcaggaacaactggcgatggccttcgccgggscgctggtggcctcattgattgttgcctttaccggcagtcagggcggcgggcagttaagtccggtgcgtttaamcctggcgggcgtggcgctggcggcggtgctggaaggactgaccagcggcatcgccctgcttaatcctgacgtctacgatcagttgcgtttctggcaagccggttcgctggatattcgcaatctacataccttaaaagtggtgctgatcccggtgctgatcgccggagcaactgcgctattactgartcscgcgctgaacagtttgagcctcggcagcgacaccgcgacggcgctgggcagtcgcgtggcgcgcacacagttgattggtctgctggcgattaccgtgctttgtggtagtgcgacggcaatagttggcccgattgcctttattggcctgatgatgccgcatatggcgcgttggctggtgggtgccgatcatcgctggtcgctgcccgtcacgctacttgctacccctgccctgctgctgtttgccgatatcatcgggcgggtgattgtgcccggcgaactgcgcgtttctgtggtcagtgcgtttattggtgcaccggtgctgatcttcctcgtgcgacgtaaaacgcgaggtggtgcatgatttacgtctctcgccgattactcatcacctgtttgctgctggtttccgcctgtgtggttgcaggtatctggggattacgcagcggtgccgtcacgctggaaacctcgcaggtattcgccgcgctgatgggcgatgcgccgcgcagtatgacgatggtggtcaccgaatggcgtttaccacgcgtgctgatggcgctgttgattggcgcarcactgggcgtcagtggcgcgatttttcagtcgctgatgcgtaacccgctcggcagccctgacgtaatgggctttaacaccggggcgtggagcggcgtgctggtgg

SEQ ID NO: 2118 - DNA, 312 bp, Homo sapiens
  misc_feature (44)..(44): n equals a,t,g, or c
  misc_feature (50)..(50): n equals a,t,g, or c
  misc_feature (69)..(69): n equals a,t,g, or c
tgctcgcctggcgcaacggcatcgacacctttcggttgattatnatcggnatcggcgttcgcgccatgntggtggcctttaatacctggctgttgctgaaagcgtctttagaaacggcgctaacagcaggtttgtggaatgccggatcgctcaacggcctgacgtgggcaaaaacctcgccttccgcacccatcattatattgatgctcattgccgccgccttactggtacgccggatgcgcttgctggaaatgggcgatgataccgcgtgtgcgctgggcgtcagcgtcgaacgttcgcgtctgttaatga

SEQ ID NO: 2119 - DNA, 1431 bp, Homo sapiens
gcagccaggattgtttattcattacaatgccttgccatcaaatattttaaatacctattcttaggctgcacatgctaacatatccaaataagatcgataacgataattaatttcattatcatggaagttcgtatgtctggttctgttgccgtgacacgcgccattgccgtgcccggattgctgttattactgattatcgcgacggcattaagcctgctcattggggcaaaatcactccccgcttccgtagtgctggaggccttctccggcaccctgccagagcgcccgaactgcaccatccgtgctccgaacgcgcggctgccgcgttaccccttgccggttttacttggcaggcgggcgcttggccttgccggggcgttaatgcaaaccctcacccgaaacccacttgccgaccccggcttgcttggcgtaacgccggaaccagctttgccattgtgctgggagcggcgctgtttggttactcttccgcgcaggaacaactggcgatggccttcgccggggcgctggtggcctcattgattgttgcctttaccggcagtcagggcggcgggcagttaagtccggtgcgtttaaccctggcgggcgtggcgctggcggcggtgctggaaggactgaccagcggcatcgccctgcttaatcctgacgtctacgatcagttgcgtttctggcaagccggttcgctggatattcgcaatctacataccttaaaagtggtgctgatcccggtgctgatcgccggagcaactgcgctattactgagtcgcgcgctgaacagtttgagcctcggcagcgacaccgcgacggcgctgggcagtcgcgtggcgcgcacacagttgattggtctgctggcgattaccgtgctttgtggtagtgcgacggcaatagttggcccgattgcctttattggcctgatgatgccgcatatggcgcgttggctggtgggtgccgatcatcgctggtcgctgcccgtcacgctacttgctacccctgccctgctgctgtttgccgatatcatcgggcgggtgattgtgcccggcgaactgcgcgtttctgtggtcagtgcgtttattggtgcaccggtgctgatcttcctcgtgcgacgtaaaacgcgaggtggtgcatgatttacgtctctcgccgattactcatcacctgtttgctgctggtttccgcctgtgtggttgcaggtatctggggattacgcagcggtgccgtcacgctggaaacctcgcaggtattcgccgcgctgatgggcgatgcgccgcgcagtatgacgatggtggtcaccgaatggcgtttaccacgcgtgctgatggcgctgttgattggcgcagcactgggcgtcagtggcgcgatttttcagtcgctgatgcgtaacccgctcggcagccctgacgtaatgggctttaa

SEQ ID NO: 2120 - DNA, 853 bp, Homo sapiens
  misc_feature (796)..(796): n equals a,t,g, or c
  misc_feature (809)..(809): n equals a,t,g, or c
  misc_feature (817)..(817): n equals a,t,g, or c
ctcgtgcgacgtaaaacgcgaggtggtgcatgatttacgtctctcgccgattactcatcacctgtttgctgctggtttccgcctgtgtggttgcaggtatctggggattacgcagcggtgccgtcacgctggaaacctcgcaggtattcgccgcgctgatgggcgatgcgccgcgcagtatgacgatggtggtcaccgaatggcgtttaccacgcgtgctgatggcgctgttgattggcgcagcactgggcgtcagtggcgcgatttttcagtcgctgatgcgtaacccgctcgggcagccctgacgtaatgggctttaaacaccggggcgtggagcggcgtgctggtggcgatggtgctgtttggtcaggacctgacggctattcgcgctgtcagcaatggtgggcggcattgtcacttcgctgctggtctggstgctcgcctggcgcaacgggcatcgacacctttcggttgattattatcggtatcggcgttcgcgccatgctggtggcctttaatacctggctgttgctgaaagcgtctttagaaacggcgctaacagcagggtttgtggaatgccggatcgctcaacggcctgacgtgggcaaaaacctcgccttccgcacccatcattatattgatgctcattgccgccgccttactggtacgccggatgcgcttgctggaaatgggcgatgataccgcgtgtgcgctgggcgtcagcgtcgaacgttcgcgtctgttaatgatgctggttgcagtggtgcttamcgytgsggcaacagcgyttgccggnccgatttccttwntggtttangtcgsaccgmamattgcccgacgcattagcaacacc

SEQ ID NO: 2121 - DNA, 1046 bp, Homo sapiens
aattcggcacgagcccggccggttagtggcggcttcgaggccatagtgagacatgagccggagtagccatataaagatgacggcgccttgaggtaagctacaggcaacaccacttccgcgtttctcttgcgccctggtccaagatggcggatgaagccacgcgacgtgttgtgtctgagatcccggtgctgaagactaacgccggaccccgagatcgtgagttgtgggtgcagcgactgaaggaggaatatcagtcccttatccggtatgtggagaacaacaagaatgctgacaacgattggttccgactggagtccaacaaggaaggaactcggtggtttggaaaatgctggtatatccatgacctcctgaaatatgagtttgacatcgagtttgacattcctatcacatatcctactactgccccagaaattgcagttcctgagctggatggaaagacagcaaagatgtacaggggtggcaaaatatgcctgacggatcatttcaaacctttgtgggccaggaatgtgcccaaatttggactagctcatctcatggctctggggctgggtccatggctggcagtggaaatccctgatctgattcagaagggcgtcatccaacacaaagagaaatgcaaccaatgaagaatcaagccactgaggcagggcagagggacctttgataggctacgatactattttcctgtgcatcacacttaactcatctaactgcttccccggacaccctccacctctagttgttactaagtagctgcagtaggcattgctggggaagaaacaaacacacaccaaacagtactgctacttagtttctaaggctgcacagggaagggaaagactgggctttggacaatctagaggtaatttatatccgcccccaggtggagcaacatgcgattctggaggcacgggggtaactgaaagtgagtacatatagtctttctggtttctggagataacccatcaataaaagctgcttcctctggtaaaaaaaaaaaaaaaaaaaaaaaaaaaaaaaaaaac

SEQ ID NO: 2122 - DNA, 624 bp, Homo sapiens
  misc_feature (420)..(420): n equals a,t,g, or c
  misc_feature (442)..(442): n equals a,t,g, or c
  misc_feature (447)..(447): n equals a,t,g, or c
accgcggtgaacacggattatatggcgtgagccaccgctystggccagggtctgttcctagttgcaacagttcttggaaacccactcgagagggccacgcctccattcaccaggccacgcatcacaagaggcaacaccaggagccaacatgagctcggggactgaactgctgtggcccggagcagcgctgctggtgctgttgggggtggcagccagtctgtgtgtgcgctgctcacgcccaggtgcaaagaggtcagagaaaatctaccagcagagaagtctgcgtgaggaccaacagagctttacggggtcccggacctactccttggtcgggcaggcatggccaggacccctggcggacatggcacccacaaggaaggacaagctgttgcaattctaccccagcctggaggatccagnatcttccaggtaccagaacttnagcanaggaagcagacacgggtcggaggaagcctacatagaccccattgccatggagtattacaactgggggcggttctcgaagcccccagaagatgatgatgccaattcctacgagaatgtgctcatttgcaagcagaaaaccacagagacaggtgcccagtaggagggcataggtggcct

SEQ ID NO: 2123 - DNA, 1794 bp, Homo sapiens
gggctgcaggaattccccggggttggcatcagcttgggcaggtgtgcgggctcattggggcggccgtggtgaggaaccctggactctcagcatcacaagaggcaacaccaggagccaacatgagctcggggactgaactgctgtggcccggagcagcgctgctggtgctgttgggggtggcagccagtctgtgtgtgcgctgctcacgcccaggtgcaaagaggtcagagaaaatctaccagcagagaagtctgcgtgaggaccaacagagctttacggggtcccggacctactccttggtcgggcaggcatggccaggacccctggcggacatggcacccacaaggaaggacaagctgttgcaattctaccccagcctggaggatccagcatcttccaggtaccagaacttcagcaaaggaagcagacacgggtcggaggaagcctacatagaccccattgccatggagtattacaactgggggcggttctcgaagcccccagaagatgatgatgccaattcctacgagaatgtgctcatttgcaagcagaaaaccacagagacaggtgcccagcaggagggcataggtggcctctgcagaggggacctcagcctgtcactggccctgaagactggccccacttctggtctctgtccctctgcctccccggaagaagatgaggaatctgaggattatcagaactcagcatccatccatcagtggcgcgagtccaggaaggtcatggggcaactccagagagaagcatcccctggcccggtgggaagcccagacgaggaggacggggaaccggattacgtgaatggggaggtggcagccacagaagcctagggcagaccaagaagaaaggagccaaggcaaagagggaccactgtgctcatggacccatcgctgccttccaaggaccatttcccagagctactcaacttttaagcccctgccatggttgctcctggaaggagaaccagccaccctgaggaccacctggccatgcgtgcacagcctgggaaaagacagttactcacgggagctgcaggcccgtcaccaagccctctcccgacccaggctttgtggggcaggcacctggtaccaagggtaacccggctcctggtatggacggatgcgcaggatttaggataagctgtcacccagtccccataacaaaaccactgtccaacactggtatctgtgttcttttgtgctatgaatttggattcctaattgctattgttggttgctggggttttaaatgattgataagcttgtacagttaacttatagagggggagccatatttaacattctggatttcagagtagagatttctgtgttgtctcctagaaagcattacatgtagtttatttcagcatccttgttgggtggggccctggctctcttcccctttggtgggacctcccctttctttgggcttcagttcactcaggaagaaatgaggctgtcgccatctttatgtgcttccagtggaaatgtcacttgctacagacaatagtgcatgagagtctagagaagtagtgaccagaacagggcagagtaggtcccctccatggccctgaatcctcctctgctccagggctggcctctgcagagctgattaaacagtgttgtgactgtctcatgggaagagctggggcccagagggaccttgagtcagaaatgttgccagaaaaagtatctcctccaaccaaaacatctcaataaaaccattttagttgaaaaaaaaaaaaaaaaaaaaaaaaaaaaaaaaaaactcgag

SEQ ID NO: 2124 - DNA, 1773 bp, Homo sapiens
cccggggttggcatcagcttgggcaggtgtgcgggctcattggggcggccgtggtgaggaaccctggactctcagcatcacaagaggcaacaccaggagccaacatgagctcggggactgaactgctgtggcccggagcagcgctgctggtgctgttgggggtggcagccagtctgtgtgtgcgctgctcacgcccaggtgcaaagaggtcagagaaaatctaccagcagagaagtctgcgtgaggaccaacagagctttacggggtcccggacctactccttggtcgggcaggcatggccaggacccctggcggacatggcacccacaaggaaggacaagctgttgcaattctaccccagcctggaggatccagcatcttccaggtaccagaacttcagcaaaggaagcagacacgggtcggaggaagcctacatagaccccattgccatggagtattacaactgggggcggttctcgaagcccccagaagatgatgatgccaattcctacgagaatgtgctcatttgcaagcagaaaaccacagagacaggtgcccagcaggagggcataggtggcctctgcagaggggacctcagcctgtcactggccctgaagactggccccacttctggtctctgtccctctgcctccccggaagaagatgaggaatctgaggattatcagaactcagcatccatccatcagtggcgcgagtccaggaaggtcatggggcaactccagagagaagcatcccctggcccggtgggaagcccagacgaggaggacggggaaccggattacgtgaatggggaggtggcagccacagaagcctagggcagaccaagaagaaaggagccaaggcaaagagggaccactgtgctcatggacccatcgctgccttccaaggaccatttcccagagctactcaacttttaagcccctgccatggttgctcctggaaggagaaccagccaccctgaggaccacctggccatgcgtgcacagcctgggaaaagacagttactcacgggagctgcaggcccgtcaccaagccctctcccgacccaggctttgtggggcaggcacctggtaccaagggtaacccggctcctggtatggacggatgcgcaggatttaggataagctgtcacccagtccccataacaaaaccactgtccaacactggtatctgtgttcttttgtgctatgaatttggattcctaattgctattgttggttgctggggttttaaatgattgataagcttgtacagttaacttatagagggggagccatatttaacattctggatttcagagtagagatttctgtgttgtctcctagaaagcattacatgtagtttatttcagcatccttgttgggtggggccctggctctcttcccctttggtgggacctcccctttctttgggcttcagttcactcaggaagaaatgaggctgtcgccatctttatgtgcttccagtggaaatgtcacttgctacagacaatagtgcatgagagtctagagaagtagtgaccagaacagggcagagtaggtcccctccatggccctgaatcctcctctgctccagggctggcctctgcagagctgattaaacagtgttgtgactgtctcatgggaagagctggggcccagagggaccttgagtcagaaatgttgccagaaaaagtatctcctccaaccaaaacatctcaataaaaccattttagttgaaaaaaaaaaaaaaaaaaaaaaaaaaaaaaaaaaa

SEQ ID NO: 2125 - DNA, 2622 bp, Homo sapiens
  misc_feature (2590)..(2590): n equals a,t,g, or c
tcgacccacgcgycckgctcttcccagtttctccgtcagcctgcgggtcccggctggcggctgcttccggtaggagagcggtgtagagcgagcaggtctcagctcctcgtcatgtcatacggtcccttagacatgtaccggaacccggggccctcggggccccagctccgggacttcagcagcatcatccagacgtgcagcggcaacatccagcggatcagccaagccactgctcagataaagaatttgatgagccagctaggaactaagcaggactcaagcaagctacaggaaaatctgcaacagttacaacactccacaaatcagctcgccaaggaaacaaatgaattgctgaaagaattagggtccttgccccttcccttatctacttcagaacagcgccagcagagacttcagaaggaacgcctcatgaatgacttctctgcagccttaaacaatttccaggctgtgcagagaagggtatctgaaaaggaaaaggagagtattgccagagcaagagctggatctcgtctttctgcagaagagaggcaaagagaggagcagctggtctcatttgacagccatgaggagtggaaccagatgcagagccaggaggatgaggtggccatcactgagcaggatttggaacttattaaagaaagagaaacggcaattcggcagctggaggctgacattttggatgtcaatcagatatttaaagatttggccatgatgatccatgaccagggtgatctgattgatagcatagaagccaatgtggaaagctcagaggtgcacgtcgaaagagccactgaacagttacagcgagctgcttactatcagaaaaaatctcgcaagaagatgtgtatcctggtgcttgtcctgtcagtgattattctaatcttgggacttattatctggctagtttataaaacgaatgattgcctccgatcgttctcccgctgagctgttttcaagggcaagtgcttgttgaagtcttgccagaacaaactgatcacaagaagacagcatatatcagaacgtcctgtaatcatttagttagaaactaactactaactagtctttggaattcgtgacctatggagacagtaattatcaatttattgattctattgatttctcaaattaggaattaacttatgtggattttgcttcctcttgtattctgattgcccttcatcccaagtgtttactgaaaattccattctagatattcttgttttgacaaatgacactacagtctcgtaatattgtcttttatgtatatacaaaatttacctttttactagcatctgagatagagttactttctggtacccagtatattggagtctgtcagaaactctataataggccaccagtttttattatttaacatttttatttgaatttctaagaagcctattctctatctattttgaaagattttggcactatatttaattggaaggtaaaatattgtacatgtgatccagagtaaatgagaagtctctatctgagctggtcagttactggagtacatgttactaatctgggtttaaagtttacttcattatctgctagtgtcatccacagcagttcatcctcatccacactaagccatcctgttagcttttaaaggaagttaatttaattaacattaatatactctatgggctccctctcccacctgtctgcatagaaaggcagaattagacatagcatgctttggaaaagcaaataggaattgttgggaatgatttaatcttgttgttgttgttgttgttgttcacttgtggttctacattcctggtgaatgatgaatgttgctgtcaaagggctgccccctaccttataagggttgctgggcatttgaaggcaggaagatttttaaagatagattgaggttggtttaaaattattcctgtaaaccaacaataaagcaaagaagaggttcatttttgtaaataacactggtttcaaatagtgatgttagacttaacctaatttataaacaagagattaatatctccatgcatagttttagacaaaaaaagatgtttcaataaaattactgtcttgtaatataaatgttgtccacttcccttttccacaggcctagaacagttaaagggaacataatttgtttaggctcccacataaatgtgaatctggccaacaactttggttcatcctttagtgaattagaggatttggctaccctgagtatatttatattcatttcttctgttctccttctgttattatacttaatcttctaaactaaactaatgtgaacagtagggaagcaagggcccaaatgcataagtttctttgcactgttgcacttacttaatacaaataaatgttttttaaagcttttgtagtatgtttttatgagttaacatcctaatgtggtaggtattaggtaatgtgctgtcatgagaaaaattgagacttccaagaaaactggacaccaggtgagggttggtttggagacggaataggtgtagctgcctttycttgaaaacartgtgtagagatggctgaatgcatkgctacacttgtatccaacactttggaagctgangcggaggawcagtatatcggacgtctgagcca

SEQ ID NO: 2126 - DNA, 1395 bp, Homo sapiens
ggcacgaggtggggtcgccttgtaggccttgtgtacatcctgcctgctgcctacttttggagaaagggctggctcagccgtggcatgaaaggacgtgttcttgccctctgtggcctcgtctgcttccagggtctgttgggatggtatatggtgaaaagtggactagaagaaaaatcagactcccatgacatccctcgggtcagtcagtaccgccttgctgcccacctgggatcagccctggttctttattgtgccagcttgtggacctcactgtcactgctactccctccgcacaagttgcctgaaacccaccaactcctacagttgagacgatttgctcatggaacagcaggtctggtgttccttacggccctctcaggggcttttgtggcagggctagatgctgggcttgtttataactcctttcccaaaatgggagaatcctggatcccggaggacctctttaccttctcccccatcctgaggaatgtttttgagaatcccaccatggtgcagtttgatcaccggattctgggaatcacttcagtcactgccattacagtgctctacttcctctctcggagaattccccttcctagaaggaccaagatggcagcagtgactctgctggctttggcgtatacacaggtgggcttgggcatcagcacgctgctgatgtatgtcccaactcctctggccgccactcaccagtcaggctccttggctttgctcactggtgctctttggctgatgaatgaactccgaagagtcccaaaatgattcttagaggaccagcctcctgggactgtgactgcttttgagagctcttcagagatcataagaacttgggcttttctacgagatgaccttgacataccaagtggtttccaaatggtcaacttacttaaaaatcttttcctgttttgagatagtcactggatcaagaatgcattaagtgtggttaccctaaatgttcccttttaaatctgcttttcatgttgaaaatcagttttaatgtagagaaagaaatgtctgccatttgctgcttaacaggctttgtgtcaggtttttcagtgttggcaagctcttggttctacgtggatgatttctacgtggatgttctcctgagtccttaattctgcctaaatagaatttctttatgatcttaacttcacttccattaggtgaagattgaaaggataggattgacatacccaaagtagccagctggtcttcagcaaaaaaaaaaaagctaatgtcttctaatatcctgattttcagaaatggggaaattgcagattttgacaagcttaatgtgtatatgtagcaaaatggtttttaagtacttggaaaaggaggtaatcgccaaatagttccattttttttttttttttt

SEQ ID NO: 2127 - DNA, 595 bp, Homo sapiens
tcggcacgagcaaccttcaggtccagccctggagctggaggagtggagccccactctgaagacgcagcctttctccaggttctgtctctcccattctgattcttgacaccagatgcaggtgcttactgctctgttgtcaggtggcctggctttacttggagccctgatttgctttgtcacttctggagttgctctgaaagatggtcctttttgcatgtttgatgtttcatccttcaatcagacacaagcttggaaatatggttacccattcaaagacctgcatagtaggaattatctgtatgaccgttcgctctggaactccgtctgcctggagccctctgcagctgttgtctggcacgtgtccctcttctccgcccttctgtgcatcagcctgctccagcttctcctggtggtcgttcatgtcatcaacagcctcctgggccttttctgcagcctctgcgagaagtgacaggcagaaccttcacttgcaagcatgggtgttttcatcatcggctgtcttgaatcctttctacaaggagtgggtacgaattataaacaaacttcccctttaaaaaaaaaaaaaaaaaaactcgag

SEQ ID NO: 2128 - DNA, 587 bp, Homo sapiens
ggcacgagcaaccttcaggtccagccctggagctggaggagtggagccccactctgaagacgcagcctttctccaggttctgtctctcccattctgattcttgacaccagatgcaggtgcttactgctctgttgtcaggtggcctggctttacttggagccctgatttgctttgtcacttctggagttgctctgaaagatggtcctttttgcatgtttgatgtttcatccttcaatcagacacaagcttggaaatatggttacccattcaaagacctgcatagtaggaattatctgtatgaccgttcgctctggaactccgtctgcctggagccctctgcagctgttgtctggcacgtgtccctcttctccgcccttctgtgcatcagcctgctccagcttctcctggtggtcgttcatgtcatcaacagcctcctgggccttttctgcagcctctgcgagaagtgacaggcagaaccttcacttgcaagcatgggtgttttcatcatcggctgtcttgaatcctttctacaaggagtgggtacgaattataaacaaacttcccctttaaaaaaaaaaaaaaaaaaa

SEQ ID NO: 2129 - DNA, 1283 bp, Homo sapiens
ggcaaggccccctccaactcagggagacccccccaactccttagccctctgctgggtgccagcctgctgggtgacctgtcttcactgaccagcagccctggagccctccccagcctgttgcagcctcctggccctcttctctctggccagttggggctgcagctcctccctggggggggagctcctcyacccctctcagargcttctagtcccctagcctgcctgctacagagtctccagatccctccagagcagccagaagccccctgtctaccccccgagagccctgcctcagccctcgaaccagagcctgccaggcctcccctcagtgccttagccccaccccatggttctcccgaccccccagtccctgagctgctcactgggagggggtcagggaaacggggccggaggggaggagggggacttaggggcattaatggtgaggccaggccagcccggggccgaaagcctggcagccggcgggagcctggccgactggccctcaaatgggggacacgtggtggcttcaatggacaaatggaaaggtccccaagaagaacccaccattggcagcataatggggagctggctgaagggggtgctgagcccaaggatccaccccctcccgggccccattctgaggaccttaaggtgcccccgggagtagtcagaaagtctcgtcgtggccgtaggagaaaatacaaccctacccggaacagcaatagctcccgccaggacattaccttggaacccagccctacagcccgagcagctgtccctctgcctccccgggcccgccctggccgtcctgccaaaaacaagaggaggaaactggccccatagcagccatacctggagctggatctgaccctgattggggagagctgagtgctgagccttgggagcccctgccagccacctgcacctgtggacagtggccaacaggctcagtttacaaacctgtgagctactgttggctgctgccctccttcccagtgaaagagacgttgtgatgatgcgactgaggattatgcaacgtggtccaaccggagcggccagcatgaccagctgtccaggggctgcctcctgccttttcttttgtaaagacaagacccttgggagttttaattctgttttgtacttgccctgtggggcctccactgcttttctatgggagacactcttaatttaacagatgagaatattttgaaactctgaaaaaaaaaaaaaaaaaaaaaaaaaaaaaaaaaaaaaaaaaaaaaaaaaaaaaaaaaaaaaaa

SEQ ID NO: 2130 - DNA, 1814 bp, Homo sapiens
  misc_feature (9)..(9): n equals a,t,g, or c
  misc_feature (1760)..(1761): n equals a,t,g, or c
  misc_feature (1799)..(1799): n equals a,t,g, or c
cgcaagggncggggttgccggaagaagtggcgaagttacttttgagggtatttgagtagcggcggtgtgtcaggggctaaagaggaggacgaagaaaagcagagcaagggaacccagggcaacaggagtagttcactccgcgagaggccgtccacgagacccccgcgcgcagccatgagccccgccccccgctgttgcttggagaggggcgggacctggagagaggctgctccgtgaccccaccatgtcctctcctaccacgagttccctggatacccccctgcctggaaatggcccccctcagcctggcgccccttcttcttccggcgcagtgtggtccgtggtggggccaggcgctatgcctgccggggtggcggaacctgccagatggacgctttcatgcggcgcaagtgccagcagtgccggctgcgcaagtgcaaggaggcagggatgagggagcagtgcgtcctttctgaagaacagatccggaagaagaagattcggaaacaacagcagcaggagtcacagtcacagtcgcagtcacctgtggggccgcaggcagcagcagctcagcctctgggcctggggcttcccctggtggatctgaggcaggcagccagggctccggggaaggcgagggtgtccagctaacagcggctcaagaactaatgatccagcagttggtggcggcccaactgcagtgcaacaaacgctccttctccgaccagcccaaagtcacgccctggcccctgggcgcagacccccagtcccgagatgcccgccagcaacgctttgcccacttcacggagctggccatcatctcagtccaggagatcgtggacttcgctaagcaagtgcctggtttcctgcagctgggccgggaggaccagatcgccctcctgaaggcatccactatcgagatcatgctgctagagacagccaggcgctacaaccacgagacagagtgtatcaccttcttgaaggacttcacctacagcaaggacgacttccaccgtgcaggcctgcaggtggagttcatcaaccccatcttcgagttctcgcgggccatgcggcggctgggcctggacgacgctgagtacgccctgctcatcgccatcaacatcttctcggccgaccggcccaacgtgcaggagccgggccgcgtggaggcgttgcagcagccctacgtggaggcgctgctgtcctacacgcgcatcaagaggccgcaggaccagctgcgcttcccgcgcatgctcatgaagctggtgagcctgcgcacgctgagctctgtgcactcggagcaggtcttcgccttgcggctccaggacaagaagctgccgcctctgctgtcggagatctgggacgtccacgagtgaggggctggccacccagccccacagccttgcctgaccaccctccagcagatagacgccggcaccccttcctcttcctagggtggaaggggccctgggccgagcctgtagacctatcggctctcatcccttgggataagccccagtccaggtccaggaggctccctccctgcccagcgagtcttccagaaggggtgaaagggttgcaggtcccgaccactgacccttcccggctgccctccctccccagcttacacctcaagcccagcacgcagtgcaccttgaacagagggaggggaggacccatggctctcccccctagcccgggagaccaggggccttcctcttcctctgcttttatttaataaaaactaaaaacagaaamannaaaaaaaaaaaaaaaaaaaggatgcgcgccgccaagcnttattccctcttagt

SEQ ID NO: 2131 - DNA, 1426 bp, Homo sapiens
  misc_feature (1)..(1): n equals a,t,g, or c
  misc_feature (7)..(7): n equals a,t,g, or c
  misc_feature (15)..(15): n equals a,t,g, or c
  misc_feature (21)..(21): n equals a,t,g, or c
  misc_feature (24)..(24): n equals a,t,g, or c
  misc_feature (1414)..(1414): n equals a,t,g, or c
  misc_feature (1421)..(1421): n equals a,t,g, or c
  misc_feature (1425)..(1425): n equals a,t,g, or c
nctatanatcatacnggaaanggnagactgcagtacggtcggaatcccgggtcgacccacgcgtccggtgggaatgaatgaagttaggagttgaacttaacatccttttgatatgggctttggagtcttacctgttgccctgcaatgaagtagaaactgatgctgccatgcactgactccagcagatacatagcgttgtgtgctgggaggagaggctggaatggattatcccaaggtcccttcaacctaagatggccctaaggaataatggtgctgccactggcctccacctgccacatgcatgggtgccatcgcctatttcaaactctcctcccagtactgaagtcttcctggctctctgtgccaggcttagctgtgcccttggttatggcagttttcttaatttcttcaagttattttcttctgtgtgtctttaccattagatccctgagggcatgggtcttgccgtttacctctgtccctagagctcaaggcggttcttgctgtcggtctcagtggttatataagaccctccctycttgkttggtctgtaaacctgtgtaggacagacgtctgcatctaatggtggcattgggttcacaggagacaggcccatctgagggatgtggatggcataggctgtactttgtggcccaaggttgtccccaaccaagtcaaccaaggtggattctctggtgcagatttgcgggcagtggtttgtcatttctttcctgtctctgtgactcactccttgttttgtagagctgttctttaaaatcccttgagtgtattaatactttccatttcattgttcatttggcgaaaatcattcttaataagtacattctcaagtgcagtgcccagtgtttgkttttcttgcacattcttagagcctaattttgcagcttacaaaattgtataaatctgtctgtataatacacgtggaacattcctctggatttattggcaaggaaggttgaagcccaggtttggaatccgcaaactaaattttaaccctagctttggctttttattttcttttaagcagacttttttcccttagaaaagtaattcatgattattatagaagcataaagaataaggtagaagaagatctatccagaataaaccacttttaacatttttgtattcttttctatgcagatttttaaaaactattatcttaaaatagytaagataattattattgtctgtagctttgccataagattataactaaattttctataaaaattaaatggggagctttggtttcagtggttacataacawttcatcawttaactgggccmtaatttaaaccattctcctgcagttggacattaagaatggttccaactttttacyttcataaataagkcctgggatgaacaattttggtcctctacctgggnacctggnaagnc

SEQ ID NO: 2132 - DNA, 1308 bp, Homo sapiens
  misc_feature (1248)..(1248): n equals a,t,g, or c
  misc_feature (1256)..(1256): n equals a,t,g, or c
  misc_feature (1261)..(1261): n equals a,t,g, or c
  misc_feature (1277)..(1277): n equals a,t,g, or c
gcatcgcgtctcgggggaggagtctgtaccctcgtgatgtccccgccccggttcccaggcaagtttagggaagtgaaaggcgccaggtgccagtcctggcctctgatgtaacccagcgccccgcagtcccgacacagattcctggatctcagccccatagcagctatgatcccgctgctgctggcagcgctgctgtgcgtccccgccggggccctgacctgctacggggactccgggcagcctgtagactggttcgtggtctacaagctgccagctcttagagggtccggggaggcggcgcagagagggctgcagtacaagtatctggacgagagctccggaggctggcgggacggcagggcactcatcaacagcccggagggggccgtgggccgaagcctgcagccgctgtaccggagcaacaccagccagctcgccttcctgctctacaatgaccaaccgcctcaacccagcaaggctcaggactcttccatgcgtgggcacacgaagggtgtcctgctccttgaccacgatgggggcttctggctggtccacagtgtacctaacttccctccaccggcctcctctgctgcatacagctggcctcatagcgcctgtacctacgggcagaccctgctctgtgtgtcttttcccttcgctcagttctcgaagatgggcaagcagctgacctacacctacccctgggtctataactaccagctggaagggatctttgcccaggaattccccgacttggagaatgtggtcaagggccaccacgttagccaagaaccctggaacagcagcatcacactcacatcccaggccggggctgttttccagagctttgccaagttcagcaaatttggagatgacctgtactccggctggttggcagcagcccttggtaccaacctgcaggtccagttctggcacaaaactgtaggcatcctgccctctaactgctcggatatctggcaggttctgaatgtgaaccagatagctttccctggaccagccggcccaagcttcaacagcacagaggaccactccaaatggtgcgtgtccccaaaagggccctggacctgcgtgggtgacatgaatcggaaccagggagaggagcaacggggtgggggcacactgtgtgcccagctgccagccctctggaaagccttccagccgctggtgaagaactaccagccctgtaatggcatggccagggaagcccagcagagcttataagatctnaacccttnatggnccaggtgcagtkgctncamgtatgtkaatccccagtcatttttggga

SEQ ID NO: 2133 - DNA, 2255 bp, Homo sapiens
ccacgcgtccgcatcgcgtctcgggggaggagtctgtaccctcgtgatgtccccgccccggttcccaggcaagtttagggaagtgaaaggcgccaggtgccagtcctggcctctgatgtaacccagcgccccgcagtcccgacacagattcctggatctcagccccatagcagctatgatcccgctgctgctggcagcgctgctgtgcgtccccgccggggccctgacctgctacggggactccgggcagcctgtagactggttcgtggtctacaagctgccagctcttagagggtccggggaggcggcgcagagagggctgcagtacaagtatctggacgagagctccggaggctggcgggacggcagggcactcatcaacagcccggagggggccgtgggccgaagcctgcagccgctgtaccggagcaacaccagccagctcgccttcctgctctacaatgaccaaccgcctcaacccagcaaggctcaggactcttccatgcgtgggcacacgaagggtgtcctgctccttgaccacgatgggggcttctggctggtccacagtgtacctaacttccctccaccggcctcctctgctgcatacagctggcctcatagcgcctgtacctacgggcagaccctgctctgtgtgtcttttcccttcgctcagttctcgaagatgggcaagcagctgacctacacctacccctgggtctataactaccagctggaagggatctttgcccaggaattccccgacttggagaatgtggtcaagggccaccacgttagccaagaaccctggaacagcagcatcacactcacatcccaggccggggctgttttccagagctttgccaagttcagcaaatttggagatgacctgtactccggctggttggcagcagcccttggtaccaacctgcaggtccagttctggcacaaaactgtaggcatcctgccctctaactgctcggatatctggcaggttctgaatgtgaaccagatagctttccctggaccagccggcccaagcttcaacagcacagaggaccactccaaatggtgcgtgtccccaaaagggccctggacctgcgtgggtgacatgaatcggaaccagggagaggagcaacggggtgggggcacactgtgtgcccagctgccagccctctggaaagccttccagccgctggtgaagaactaccagccctgtaatggcatggccaggaagcccagcagagcttataagatctaacccttatggccaggtgcagtggctcacgtatgtaatcccagcactttgggaagccaaggagggaggatcacttgaactcaggaattcgagaccagcctgggctacatagtgagaccacatctctactagaacttaaaaaaagttagccaggcacggtgataaatgcctgtagtcccagccactgaagccagaggatcgattgaaccagggagatcatggtcacagtgaactatgattacgccaacctgggtcacatagcaagactctgtttcaaaaaaaaagggggggcgggggacgggtgggtgcagtggctcacatctgtaaccccagcactttgggaggctgagatgggcagatcacttgaggtcaggagttcgagaccagcctggccaacatggtgaaaccccatatccattaaaaatatttaaaaattagccagacatggtggcacgcgtctgtggtcctagctcctcgggaggctgaggcaggagaatcgcttgaactcgggaggcagaggttgtcatgagctgagctaacaccacggcacttcagcctgggtgacagaatgagactctgtgtcaaaaaaataaaaaataaaaaatctaagggctcaggaaaaaaaaaaaaaaaaaactcctcgtgccgattcggcacgagtcaacaccctcctagccttactactaataattattacattttgactaccacaactcaacggctacatagaaaaatccaccccttacgagtgcggcttcgaccctatatcccccgcccgcgtccctttctccataaaattcttcttagtagctatcaccttcttattatttgatctagaaattgccctccttttacccctaccatgagccctacaaacaactaacctgccactaatagttatgtcatccctcttattaatcatcatcctagccctaagtctggcctatgagtgactacaaaaaggattagactgagccgaataaaaaaaaaaaaaaaaaaa

SEQ ID NO: 2134 - DNA, 2187 bp, Homo sapiens
tcgacccacgcgtccggcaacatggcggctgccgtggtgcagcgcccgggctgagcgacagcaagtgcagcgggctcctaccccgggtgaggggtggcctccgcgtgggatcgtgccctcttcagcccgctcctgtccccgacatcacgtgtattccgcacgtcccctccgcgctgtgtgtctactgagacggggaggcgtgacagggcccgggtcccttctcagtggtgctctgtgcttcagggcaagctccccgtctccgggcgcacttccctcgcctgtgttcggtccatcctcctttctccagcctcctcccctcgcaggcggatgacccggacgacgggccagtgcctggcaccccggggttgccagggtccacggggaacccgaagtccgaggagcccgaggtcccggaccaggaggggctgcagcgcatcamcggcctgtctcccggccgttcggctctcatagtggcggtgctgtgctacatcaatctcctgaactacatggaccgcttcaccgtggctggcgtccttcccgacatcgagcagttcttcaacatcggggacagtagctctgggctcatccagaccgtgttcatctccagttacatggtgttggcacctgtgtttggctacctgggtgacaggtacaatcggaagtatctcatgtgcgggggcattgccttctggtccctggtgacactggggtcatccttcatccccggagagcatttctggctgctcctcctgacccggggcctggtgggggtcggggaggccagttattccaccatcgcgcccactctcattgccgacctctttgtggccgaccagcggagccggatgctcagcatcttctactttgccattccggtgggcagtggtctgggctacattgcaggctccaaagtgaaggatatggctggagactggcactgggctctgagggtgacaccgggtctaggagtggtggccgttctgctgctgttcctggtagtgcgggagccgccaaggggagccgtggagcgccactcagatttgccacccctgaaccccacctcgtggtgggcagatctgagggctctggcaagaaatcctagtttcgtcctgtcttccctgggcttcactgctgtggcctttgtcacgggctccctggctctgtgggctccggcattcctgctgcgttcccgcgtggtccttggggagaccccaccctgccttcccggagactcctgctcttcctctgacagtctcatctttggactcatcacctgcctgaccggagtcctgggtgtgggcctgggtgtggagatcagccgccggctccgccactccaacccccgggctgatcccctggtctgtgccactggcctcctgggctctgcacccttcctcttcctgtcccttgcctgcgcccgtggtagcatcgtggccacttatattttcatcttcattggagagaccctcctgtccatgaactgggccatcgtggccgacattctgctgtacgtggtgatccctacccgacgctccaccgccgaggccttccagatcgtgctgtcccacctgctgggtgatgctgggagcccctacctcattggcctgatctctgaccgcctgcgccggaactggcccccctccttcttgtccgagttccgggctctgcagttctcgctcatgctctgcgcgtttgttggggcactgggcggcgcagccttcctgggcaccgccatcttcattgaggccgaccgccggcgggcacagctgcacgtgcagggcctgctgcacgaagcagggtccacagacgaccggattgtggtgccccagcggggccgctccacccgcgtgcccgtggccagtgtgctcatctgagaggctgccgctcacctacctgcacatctgccacagctggccctgggcccaccccacgaagggcctgggcctaaccccttggcctggcccagcttccagagggaccctgggccgtgtgccagctcccagacactacmtgggtagctcaggggaggaggtgggggtccaggagggggatccctctccacaggggcagccccaagggctcggtgctatttgtaacggaataaaatttgtagccagaaaaaaaaaaaaaaaaaaaaactcgagggggggcccgagtacccaattggccctacgaagaggcgaacag

SEQ ID NO: 2135 - DNA, 1248 bp, Homo sapiens
ggaattcggcacgagccaaagtgaaggatatggctggagactggcactgggctctgagggtgacaccgggtctaggagtggtggccgttctgctgctgttcctggtagtgcgggagccgccaaggggagccgtggagcgccactcagatttgccacccctgaaccccacctcgtggtgggcagatctgagggctctggcaagaaatcctagtttcgtcctgtcttccctgggcttcactgctgtggcctttgtcacgggctccctggctctgtgggctccggcattcctgctgcgttcccgcgtggtccttggggagaccccaccctgccttcccggagactcctgctcttcctctgacagtctcatctttggactcatcacctgcctgaccggagtcctgggtgtgggcctgggtgtggagatcagccgccggctccgccactccaacccccgggctgatcccctggtctgtgccactggcctcctgggctctgcacccttcctcttcctgtcccttgcctgcgcccgtggtagcatcgtggccacttatattttcatcttcattggagagaccctcctgtccatgaactgggccatcgtggccgacattctgctgtacgtggtgatccctacccgacgctccaccgccgaggccttccagatcgtgctgtcccacctgctgggtgatgctgggagcccctacctcattggcctgatctctgaccgcctgcgccggaactggcccccctccttcttgtccgagttccgggctctgcagttctcgctcatgctctgcgcgtttgttggggcactgggcggcgcagccttcctgggcaccgccatcttcattgaggccgaccgccggcgggcacagctgcacgtgcagggcctgctgcacgaagcagggtccacagacgaccggattgtggtgccccagcggggccgctccacccgcgtgcccgtggccagtgtgctcatctgagaggctgccgctcacctacctgcacatctgccacagctggccctgggcccaccccacgaagggcctgggcctaaccccttggcctggcccagcttccagagggaccctgggccgtgtgccagctcccagacactacatgggtagctcaggggaggaggtgggggtccaggagggggatccctctccacaggggcagccccaagggctcggtgctatttgtaacggaataaaatttgtagccagaaaaaaaaaaaaaaaaaaaaaa

SEQ ID NO: 2136 - DNA, 1027 bp, Homo sapiens; identical to SEQ ID NO: 2111

SEQ ID NO: 2137 - DNA, 3747 bp, Homo sapiens
gcggccgctgtccctggtggcgcggctgagctacgccgtgggccacttcctcaacgacctgtgcgcgtccatgtggttcacctacctgctgctctacctgcactcggtgcgcgcctacagctcccgcggcgcggggctgctgctgctgctgggccaggtggccgacgggctgtgcacaccgctcgtgggctacgaggccgaccgcgccgccagctgctgcgcccgctacggcccgcgcaaggcctggcacctggtcggcaccgtctgcgtcctgctgtccttccccttcatcttcagcccctgcctgggctgtggggcggccacgcccgagtgggctgccctcctctactacggcccgttcatcgtgatcttccagtttggctgggcctccacacagatctcccacctcagcctcatcccggagctcgtcaccaacgaccatgagaaggtggagctcacggcactcaggtatgcgttcaccgtggtggccaacatcaccgtctacggcgccgcctggctcctgctgcacctgcagggctcgtcgcgggtggagcccacccaagacatcagcatcagcgaccagctggggggccaggacgtgcccgtgttccggaacctgtccctgctggtggtgggtgtcggcgccgtgttctcactgctattccacctgggcacccgggagaggcgccggccgcatgcggaggagccaggcgagcacacccccctgttggcccctgccacggcccagcccctgctgctctggaagcactggctccgggagccggctttctaccaggtgggcatactgtacatgaccaccaggctcatcgtgaacctgtcccagacctacatggccatgtacctcacctactcgctccacctgcccaagaagttcatcgcgaccattcccctggtgatgtacctcagcggcttcttgtcctccttcctcatgaagcccatcaacaagtgcattgggaggaacatgacctacttctcaggcctcctggtgatcctggcctttgccgcctgggtggcgctggcggagggactgggtgtggccgtgtacgcagcggctgtgctgctgggtgctggctgtgccaccatcctcgtcacctcgctggccatgacggccgacctcatcggtccccacacgaacagcggagcgttcgtgtacggctccatgagcttcttggataaggtggccaatgggctggcagtcatggccatccagagcctgcacccttgcccctcagagctctgctgcagggcctgcgtgagcttttaccactgggcgatggtggctgtgacgggcggcgtgggcgtggccgctgccctgtgtctctgtagcctcctgctgtggccgacccgcctgcgacgctcccgaggcggagaacaccgaacacccagtgaaggtgaggggatcagcacggcgccgccaccgtgctggaacgagactcagccacaaggaggtgcgaagctctgacccaggccacagtgcggatgcaccttgaggatgtcacgctcagtgagagacaccagacacagaagggtacgctgtgatcccacttctatgaaatgtccaggacagaccaatccacagaatcagggagaggattcgtgggtgccgggactggggagggggacctgggggtgactaggtgacataatggggacagggctgccttctgggtgatgagaatgttctggaatcagatgggatggctgcacggcgtggtgaaggtactgaacgccacctcactgtaagacggtagattttgtattttaccacaataaacaaaacaaaacaaaaccaaaamaaammmaamaaacatccagaaacctcctgccctgccctgcccctcctctggctgggcccggccttgggtgggggcggagcctgcaccctggtctccgcttcccctgcccttgtcaggtcmccacagatacgaccctgcctttmccatctggacacgcacccaggagctccactccctcggggtaggtgcccaagtcctccctgaggcccacaaggccctgcacgccctgccctcctctcctcactctgttcctcccgcataccaggtgccgtcctgccccagggcctttgcatggctgtgccctttgcctctcacccaggcgtccctgccttctccagccctggctgaaatgccaggcttgtggtgagcctctgatccaaggccgcccttccccaaggccccctccccacccttgtgacgccacctcctcacttcctcataagcttctctgtctctgggctgtgtcccccatgccagctccacatgggccaggtctgctcggtttcatcatctccaatgcccaggatggggcctgccccagctccttcaccctcttctcaggcaccgcgcaagagcgagcctcaaaaccacctggggcctcctggctgccaggacccccacagcctcccctgcagcccccggccccccggcctcctggctccctcagccacttcccagccattcctcctgttctctccgcccagaccccggggaggcaccagcaccccctgggccaggctcctgcctcctgcacctctcatcgcagaacctatggcagcctgagtttttcaattctctttccctctcactgcaccagctacattccaggatcaacagaaaagttgcagcccgccctgcggggcccttggtcagcctccccctccatctgggcgtctcccaaccactgccagggtcgccccaggaagcgatggccccactggccttcgtctgcctgtcgggtggagctgacagcagaggcacctgccccagcgctgctgagtggcccccgtgccccgcaaagcctgacgtacactcccctggggcccctccacctcctctcagctgtcctgggccatggggaaccaattcccccatttctacacgagccctggcccatcatcatgggaccctcccaccacggccttcaccccccttgctctgtccctcctggccccatctggccagccctgggggtgaactcagcccagcagtgcccaccctccctccctgatggtgtcaaccgagcacctcctccctggaacagggccgtccagctggagcgcagggacttgcctggagtccagtccttggccctgcaggattgtggccggcgccctggcagacgggcctgggaggcgtctctgcggccttcgagggctgagctccccatctgtgaaatgcaggcctgggaagcccctcagaagctgcttctgcagctccagggccagatgggggctctagggcaggaccgtgtgaccccacccgagccggggacctagagccagccagtcccggccacacatgaatccacgtgtttaatgacagcgtcactgcattacatgagaaacaaggctggtctgtcctgggagctcccccaccccctagcatgggcagaaccagccccaacacaaacctcacgccgtccgcctggccctgcggcggttcccagtcccaggaggagcctctgaaggccactgtgggttgtgcactgagccagccaagccctgacgcccacagcgacaaggcggctctttggcaactgcgggcaggggcgggcatgggcgaaggcagggttggttttcttatttaaaaaccttgaaacagtaagaccgtgaccaccggacgcgtgggtcgacccgggaattccggaccggtacctgcaggcgtaccttctatagtgtcacctaaatagctttttgcaaaagctata

SEQ ID NO: 2138 - DNA, 1288 bp, Homo sapiens
ccgggagaggcgccggccgcatgcggaggagccaggcgagcacacccccctgttggcccctgccacggcccagcccctgctgctctggaagcactggctccgggagccggctttctaccaggtgggcatactgtacatgaccaccaggctcatcgtgaacctgtcccagacctacatggccatgtacctcacctactcgctccacctgcccaagaagttcatcgcgaccattcccctggtgatgtacctcagcggcttcttgtcctccttcctcatgaagcccatcaacaagtgcattgggaggaacatgacctacttctcaggcctcctggtgatcctggcctttgccgcctgggtggcgctggcggagggactgggtgtggccgtgtacgcagcggctgtgctgctgggtgctggctgtgccaccatcctcgtcacctcgctggccatgacggccgacctcatcggtccccacacgaacagcggagcgttcgtgtacggctccatgagcttcttggataaggtggccaatgggctggcagtcatggccatccagagcctgcacccttgcccctcagagctctgctgcagggcctgcgtgagcttttaccactgggcgatggtggctgtgacgggcggcgtgggcgtggccgctgccctgtgtctctgtagcctcctgctgtggccgacccgcctgcgacgctgggaccgtgatgcccggccctgactcctgacagcctcctgcacctgtgcaagggaactgtggggacgcacgaggatgccccccagggccttggggaaaagcccccactgcccctcactcttctctggacccccaccctccatcctcacccagctcccgggggtggggtcgggtgagggcagcagggatgcccgccagggacttgcaaggaccccctgggttttgagggtgtcccattctcaactctaatccatcccagccctctggaggatttggggtgcccctctcggcagggaacaggaagtaggaatcccagaagggtctgggggaaccctaaccctgagctcagtccagttcacccctcacctccagcctgggggtctccagacactgccagggccccctcaggacggctggagcctggaggagacagccacggggtggtgggctgggcctggaccccaccgtggtgggcagcagggctgcccggcaggcttggtggactctgctggcagcaaataaagagatgacggcaaaaaaaaaaaaaaaaaaaaactcgatatcaagcttatcgataccgtcgac

SEQ ID NO: 2139 - DNA, 1951 bp, Homo sapiens; identical to SEQ ID NO: 669

SEQ ID NO: 2140 - DNA, 1190 bp, Homo sapiens
  misc_feature (2)..(2): n equals a,t,g, or c
gnaaaatgacttcaaggaggaaatggcaccattgtgcaaagcaggggctgtattttcatcaaaggtggcaaataagtactgtcttaccacacctcttttccttcctctctgttctaggtctctggggtctgatcaataatgctggtgttcccggcgtgctggctcccactgactggctgacactagaggactacagagaacctattgaagtgaacctgtttggactcatcagtgtgacactaaatatgcttcctttggtcaagaaagctcaagggagagttattaatgtctccagtgttggaggtcgccttgcaatcgttggagggggctatactccatccaaatatgcagtggaaggtttcaatgacagcttaagacgggacatgaaagcttttggtgtgcacgtctcatgcattgaaccaggattgttcaaaacaaacttggcagatccagtaaaggtaattgaaaaaaaactcgccatttgggagcagctgtctccagacatcaaacaacaatatggagaaggttacattgaaaaaagtctagacaaactgaaaggcaataaatcctatgtgaacatggacctctctccggtggtagagtgcatggaccacgctctaacaagtctcttccctaagactcattatgccgctggaaaagatgccaaaattttctggatacctctgtctcacatgccagcagctttgcaagactttttattgttgaaacagaaagcagagctggctaatcccaaggcagtgtgactcagctaaccacaaatgtctcctccaggctatgaaattggccgatttcaagaacacatctccttttcaaccccattccttatctgctccaacctggactcatttagatcgtgcttatttggattgcaaaagggagtcccaccatcgctggtggtatcccagggtccctgctcaagttttctttgaaaaggagggctggaatggtacatcacataggcaagtcctgccctgtatttaggctttgcctgcttggtgtgatgtaagggaaattgaaagacttgcccattcaaaatgatctttaccgtggcctgccccatgcttatggtccccagcatttacagtaacttgtgaatgttaagtatcatctcttatctaaatattaaaagataagtcaaacattaaaaaaaaaaaaaaaaaaaactcgag

SEQ ID NO: 2141 - DNA, 1188 bp, Homo sapiens
  misc_feature (1143)..(1143): n equals a,t,g, or c
  misc_feature (1158)..(1158): n equals a,t,g, or c
  misc_feature (1161)..(1161): n equals a,t,g, or c
  misc_feature (1178)..(1178): n equals a,t,g, or c
  misc_feature (1187)..(1187): n equals a,t,g, or c
ggcacgagcggaaacccaggcacctcgacctcaagaggatcagcctggccagggtggcacaaytcttccttccccgtgcacagcaggaaagctgccatcagctgagcaagtccaccaacagtttctgtgtcccacttcatctttaataaggacaccatcttcttgtattatacaagaaaggagtgtacctatcacacacagggggaaaaatgctcttttgggtgctaggcctcctaatcctctgtggttttctgtggactcgtaaaggaaaactaaagattgaagacatcactgataagtacatttttatcactggatgtgactcgggctttggaaacttggcagccagaacttttgataaaaagggatttcatgtaatcgctgcctgtctgactgaatcaggatcaacagctttaaaggcagaaacctcagagagacttcgtactgtgcttctggatgtgaccgacccagagaatgtcaagaggactgcccagtgggtgaagaaccaagttggggagaaaggtctctggggtctgatcaataatgctggtgttcccggcgtgctggctcccactgactggctgacactagaggactacagagaacctattgaagtgaacctgtttggactcatcagtgtgacactaaatatgcttcctttggtcaagaaagctcaagggagagttattaatgtctccagtgttggaggtcgccttgcaatcgttggagggggctatactccatccaaatatgcagtggaaggtttcaatgacagcttaagacgggacatgaaagcttttggtgtgcacgtctcatgcattgaaccaggattgttcmaaacaaacttggcagatccagtaaaggtaattgaaaaaaaactcgccatttgggagcagctgtctccaracatcaaacaacaatatggagaaggttacattgaaaaaagtctagacaaactgaaaggcaataaatcctatgtgaacatggacctctctccggtggtagagtgcatggaccacgctctaacaagtctcttccctaagactcattatgccgctggaaaagatgccaaaattttctggacccctctgtctcacatgccagcagctttgcaaaactttttattgttgaaacagaaagcanagctggctaatcccnagngaagaggtttccccatntccgcaagnt

SEQ ID NO: 2142 - DNA, 1588 bp, Homo sapiens; identical to SEQ ID NO: 670

SEQ ID NO: 2143 - DNA, 1736 bp, Homo sapiens
  misc_feature (1709)..(1709): n equals a,t,g, or c
ctgtggcgcagtttacgctttggcgataatctccaggcatggctggagcagaacgcacgtctgccgggaaatgactgtccgcaaggaaaagagtgtgaggaaaaacaatgaaaattttactggctgcgttgacgtcatcttttatgctggttggctgtacgcctcgcattgaagtcgctgcacctaaggaaccgatcactatcaatatgaacgttaaaattgagcatgagatcatcatcaaggcagacaaagatgtcgaagagctgcttgaaactcgtagcgatcttttctgaggtgatgatgaagaaaacattacttctttgtgcgtttcttgttgggctggtaagcagcaatgtaatggcattgactctggatgaagccagaactcaggggcgggtaggtgaaacattttacggttatctggttgcgctgaaaacggatgctgaaacagagaaattagtagccgacattaatgccgaacgtaaagcgagttaccaacaactggcaaagcaaaataatgtgtcggtagatgatatcgcgaaactcgccgggcamcaagctcgtagctcgggccaaaccgggggaatatgtacaagggataaacggtaaatgggtgcgaaaattttaatagcaaaaccgcaatatcgggataacgctacaggagaaggcgattgatctattttcctgaaacaaggtgaatattcaaaaactcctgtcaaattgccttttgccctgaaaaatgcatagtcaaatatctgttttaactaattggcgttgcagtacatgcaacgccaattagttagcggaatttacgtcgatactcgcctggcgtcatcccaaagcgttgcttaaataccgttgaaaaatgactctggtcagaaaatccccaatgaaagccgatgcctgccagtttttcatcatctgcggcatggcgaatcgcatctgcacaaaaatcgagacgacggttacgaatatattgcgcgactaccaaacctttatcggcaaacattcggtacaaactacgtactgacatacctgtctctccggctatccactccgggcgtaatatctcttcgcgaatattatcgtctatcaacgtaaccactttttgaaactgacgttcacgacgaggttgaacagattcccgctgatgaagtaccgggcgcagcagacacaccatcgcctgtagcgcagcttcactttctgtttcagaaagtgccggattattcatgctctcctgtaacaggcgatgactgagttgcaccatgggtaagtcagcgtccagtctttctgcgcagataggtttttgatggggaaaatattgttccagcagagtgcgtggcaaaagtaatgaaatctgtwtagaagactcctgccagtaaagcgaacaggggcgtgaggcatcgagtaacgtaatatcgccagcgccaatctgcacctgacgctcatcctgctccattattgcctgaccactaagctgaaaaacggtgtaaaaccaggcatcgtcgctgcttttacttcctgccaggtgcgggataaattcaccccgctggttgcacggtactcagctttagtcctttggcaaaatgcgtgtccagtacacccgkgtaacgctcagtcagcaggcgtccggtaaaatttccgcatacctgattgatttgggaaagccattgtgaactatatcctgggggccggaccaatcgccttanggcgatacaatactggcgcgttacacg

SEQ ID NO: 2144 - DNA, 1088 bp, Homo sapiens; identical to SEQ ID NO: 2114
  misc_feature (1073)..(1073): n equals a,t,g, or c
  misc_feature (1083)..(1083): n equals a,t,g, or c

SEQ ID NO: 2145 - DNA, 83 bp, Homo sapiens
ggcggggcccagtcccctgcaggtggtcttgcccctatgactccatgaagcacttggggaggcgcaaggccttggtgccggca

SEQ ID NO: 2146 - DNA, 1296 bp, Homo sapiens
  misc_feature (1295)..(1296): n equals a,t,g, or c
ctgctccggtgcargcccgcagggcgccctgggctgggagcaacgcgactgaccgtggtcgtgggcggacggcggctgcagcgyggaggagctggggtcgctgtgggtcgcgaagcagagcccgggacgtgcgcgcttggtgcacgatcctgaaggggagctccgaggggcccgggtckccagggctgctgcggccattcccggagcccggcgcggggcccgcgagatactggtttaggccgtcccagggctccgggcgcacccggtggccgctgctgcagcggagggagcgcggcggcgcgggggctcggagacagcgtttctcccggaagtcttcctcgggcagcaggtgggaagtgggagccggagcggcagctggcagcgttctctccgcaggtcggcaccatgcgccctgcagccctgcgcggggccctgctgggctgcctctgcctggcgttgctttgcctgggcggtgcggacaagcgcctgcgtgacaaccatgagtggaaaaaactaattatggttcagcactggcctgagacagtatgcgagaaaattcaaaacgactgtagagaccctccggattactggacaatacatggactatggcccgataaaagtgaaggatgtaatagatcgtggcccttcaatttagaagagattaaggatcttttgccagaaatgagggcatactggcctgacgtaattcactcgtttcccaatcgcagccgcttctggaagcatgagtgggaaaagcatgggacctgcgccgcccaggtggatgcgctcaactcccagaagaagtactttggcagaagcctggaactctacagggagctggacctcaacagtgtgcttctaaaattggggataaaaccatccatcaattactaccaagttgcagattttaaagatgcccttgccagagtatatggagtgatacccaaaatccagtgccttccaccaagccaggatgaggaagtacagacaattggtcagatagaactgtgcctcactaagcaagaccagcagctgcaaaactgcaccgagccgggggagcagccgtcccccaagcaggaagtctggctggcaaatggggccgccgagagccggggtctgagagtctgtgaagatggcccagtcttctatcccccacctaaaaagaccaagcattgatgcccaagttttggaaatattctgttttaaaaagcaagagaaattcacaaactgcagctttctaaaaaacaaaaaaaaaaaaaaaaaaaaaaaaaaaaaaaaaaaaaaaaaaaaaaaann

SEQ ID NO: 2147 - DNA, 903 bp, Homo sapiens
ggcacgaggggaagtgggagccggagcggcagctggcagcgttctctccgcaggtcggcaccatgcgccctgcagccctgcgcggggccctgctgggctgcctctgcctggcgttgctttgcctgggcggtgcggacaagcgcctgcgtgacaaccatgagtggaaaaaactaattatggttcagcactggcctgagacagtatgcgagaaaattcaaaacgactgtagagaccctccggattactggacaatacatggactatggcccgataaaagtgaaggatgtaatagatcgtggcccttcaatttagaagagattaaggatcttttgccagaaatgagggcatactggcctgacgtaattcactcgtttcccaatcgcagccgcttctggaagcatgagtgggaaaagcatgggacctgcgccgcccaggtggatgcgctcaactcccagaagaagtactttggcagaagcctggaactctacagggagctggacctcaacagtgtgcttctaaaattggggataaaaccatccatcaattactaccaagttgcagattttaaagatgcccttgccagagtatatggagtgatacccaaaatccagtgccttccaccaagccaggatgaggaagtacagacaattggtcagatagaactgtgcctcactaagcaagaccagcagctgcaaaactgcaccgagccgggggagcagccgtcccccaagcaggaagtctggctggcaaatggggccgccgagagccggggtctgagagtctgtgaagatggcccagtcttctatcccccacctaaaaagaccaagcattgatgcccaagttttggaaatattctgttttaaaaagcaagagaaattcacaaactgcagctttctaaaaaac

SEQ ID NO: 2148 - DNA, 1085 bp, Homo sapiens
  misc_feature (109)..(109): n equals a,t,g, or c
  misc_feature (174)..(174): n equals a,t,g, or c
tattctttggtacctgcctggccacagagcatcattcaatggaggctgagggagaagggctgggttcttacttggagttcctggtgaaatctttggctggaaagggctnactggggccacccaatggccagcatccacaaccagcttcccagtgggctgggagtttgtctaggntcagtgaccaacccaggcacagttggtggagccaccgttccctgctcctctggagtgaaggtgttccctaaggccctgggtttccttctgcaaatacacatttctctttacatgaaatgaagggcagacaaaggccaggcaaagaggtctcacctgctctgagaaaacccttgagtgccgaggcaggtgggacctttctaactccacacctttcttcaagctgaaggagaaatgggaaggaaatagcagaggtaggtgaagttcctgtctttttattttataggaaagggagatgtctgttatcccctttcttcactgccactggacacacatgccactttcctgcccttctacatatgctgcctctcttccctctctccatcttgaagtctccacccaggagagacctgtgaggtgtgggaattccatgtttgcacagctcccatctccctggaaagaggaactgatgtttgaggggacagatgtgggtcactttccctggcagtgccctctagccttgctgccttggctttctgaccccttccaggcttcaggggcctgggagatctcatgcctcagcccaggaaacatttaatagggaaagcagagacatgtcatgtcagccccacagacaagaatttctagagcacttgtcctgttgttccttgccccgacattactcagtctgggccatggaatccatccaataaacacagcaacaccctatgctactgaccaagcaaagcttgcccctggtaccaaagagctaaatcatgaccaaagtgtgacatgaatgtaactgaaatgcgggttagttgctcaatgtatgcaaagtcccacggacaagagtaaagtctgataccaataaagtgaatgtattccaaaaaaaaaaaaaaaaaaaaaaaaaaaaa

SEQ ID NO: 2149 - DNA, 401 bp, Homo sapiens
atgctgcctcctttcagtctggtctacacccactttctggtagcctctctgcttcctgtaattctggctgtttttccagactcagctcaaatagtgcccctccttaagcccatccctcgcccccagcctgaggtgatctttccctcctctgaactattagagcagttactgtctgttcagttcgtttggcaggcacacacagtggcataaattctattgttttgaactctgatttaaaattaaattgcagctgggcgtggtggctcatgcttgtaatcccaacacttagggagtcaggagaatcacttgagctcaggagttctagaccaatctgggcaacagagagaccccatctcttttaaataaaaagttaaattgcttaaaaaaaaaaaaaaaaaaaa

SEQ ID NO: 2150 - DNA, 1088 bp, Homo sapiens
  misc_feature (910)..(910): n equals a,t,g, or c
  misc_feature (960)..(960): n equals a,t,g, or c
  misc_feature (983)..(983): n equals a,t,g, or c
  misc_feature (1023)..(1023): n equals a,t,g, or c
  misc_feature (1071)..(1071): n equals a,t,g, or c
ctggccacacgcacagacaaggtccgagcccttcgggaggcgttctaccgccagaatcttcccaacctcatgaatctcatcgccaccatctttgtctttgcagtggtcatctatttccagggcttccgagtggacctgccaatcaagtcggcccgctaccgtggccagtacaacacctatcccatcaagctcttctatacgtccaacatccccatcatcctgcagtctgccctggtgtccaacctttatgtcatctcccaaatgctctcagctcgcttcartggcaacttgctggtcagcctgctggscacctggtcggacacrtcttctgggggcccagcacgtgcttatccagtggtggcctttgctattacctgtcccctccatggtccatgaactcaaccggtacatccccacagccgcggcctttggtgggctgtgcatcggggccctytcggtcctggstgacttyctargcgccattgggtctggaaccgggatcctgytcgcagtcacaatcatctaccagtactttgagatcttcgttaaggagcaaagcgaggttggcagcatgggggccctgctcttctgagcccgtctcccggacaggttgaggaagctgctccagaagcgcctcggaaggggagctctcatcatggcgcgtgctgctgcggcatatggacttttaataatgtttttgaatttcgtattctttcattccactgtgtaaagtgctagacattttccaatttaaaattttgctttttatcctggcactggcaaaaagaactgtgaaagtgaaattttattcagccgactgccagagaagtgggaatggtataggaattgtccccaagtgtccatgtaacttttggtttaacctttgcaccttctcagtgctgtatgcggntgcagcccgtctcacctggtttccccacaaagggaatttctcactctggntggaagcacaaacactgaaatgnctacgtttcaattttggcaggtagggtgtgaaagctgggnaacagaatcatggaatttccccggagacgtgggaaccttggttggcanggcttcctttaccaaat

SEQ ID NO: 2151 - DNA, 623 bp, Homo sapiens
actcggcacgaggatctgtgtaagacaaaattaatagctgtatctggagtactctaaatgtggatttatacactaacctatatattgatcaattcctctatgcttgctttggttttgagcaaattatatttaaataagtttgttgctaggaatgtcttaaaaagctactcaccctttttgttagaagtaagtaaaatgattatgtcaggacctgccattaacttggtatagtacgaatatatcctcagaatactgataaaatggtatgtcttgaaacaaatcacaaactgtcaatatgttggtgatgaatttcttctgttttcatttggatcagtaggtggggcagttcaccaagtgtgagatcgacatttaatgttttcatgaaatgcaaacccatcagtggctaatttgttaaaaaatagatgttgggcttttcttaaggctaaattgttcccatttgttttagagaacaactcacttagcctatgagtttatgcaatttggcagaaagtgaaaacatatttggaagtattgaaagtcactcattgttgatcttttatattggaatgccaaggttgcatcatcagagtgtcgttatgaaaaaaaaaaaaaaaaaactcgta

SEQ ID NO: 2152 - DNA, 1360 bp, Homo sapiens; identical to SEQ ID NO: 680

SEQ ID NO: 2153 - DNA, 1360 bp, Homo sapiens; identical to SEQ ID NO: 680

SEQ ID NO: 2154 - DNA, 1400 bp, Homo sapiens
  misc_feature (9)..(9): n equals a,t,g, or c
gatcatgtnaggcgattgggtacgggccccccctcgagtttttttttttttttttttagttttaaagctgtggaaaagctttattatagattttagtacagaattaaaaaagttcaaacaataattgtttggaaccacaaataattaaaaggaaacacagcaatcccataaacaagcattctggcatctgttagaaattttccctcaaattatgaaatgtagctctccatgctttccaatgattgttataatacccacaaatatctgtgatttcagtggaatactttaacaaaagttttctttttaaggcatgatcctgattcattttttcttcaatatctcagtcatttcaggaactaccttaaataaatctgcaactattccataatctgccacttggaaaattggagcttctgggtctttattaattgccacaattgtcttgctgtctttcatcccagctaaatgttggatggctccagatattccaacagcaatataaagttctggtgctactatttttcccgtctgtccaacttgcatgtcattgggaacaaagccagcatcaacagcagcacgggaagcaccaactgcagcatgtagttgatctgccaagtcatataacaacttaaagttctctccactcttcaagcctcgaccaccagataccaccactttggcacctgttagctctggtcgatcactttttgttaatttctggtcaagccactctgatatttccactggtgaagtacttgatgccttttctgaactggcactaccgccacttgttgctgcagcatcaaaggatgttccacggacagaaaacactttcactttctcatcacacttcactgtacatagagcatttcctgcataaatagttctcacaaatgtgtcaggtgacttgattgcaatgatgtcagaaatcggggcaacctcaagtttggctgctactctgggcaaaaggttctttccgaaggcagatgctccagcacagatgtgtgtgtaattgaactgcttctgagttgccaaaatcaatggtgtcagttcctctggaagtaggcctttgtacacatcatgctgagccaccagaacttttgctatgcctgctactttacagagatcttgtgccaccttgtcacatttggttccagctactaagcaggacacttcacctccaaggcgtgtggctgcagtaatggtatttaaagtaatgggtgctagggaatcatttgcatgctcagctattaccagggtactctgaaatcgtagcaatgaggccgcccgccggagctgccccggagccgccgctcggaacatggtctccgcttccgccgcaacctcggccttacagcagccccgtgcccggccaactggcgccgcctcagcckcgtccg

SEQ ID NO: 2155 - DNA, 1458 bp, Homo sapiens
  misc_feature (7)..(7): n equals a,t,g, or c
  misc_feature (18)..(18): n equals a,t,g, or c
aaaatcnaccctcactangggaacaaaagctggagctccaccgcggtggcggccgctctagaactagtggatcccccgggctgcaggattyggcacgagcagctgctcgtgatgctgaaataggataatcgcttgaatccaggagggtgagattgcagtgagcagagatcgtgtcactgcactccagtctgggcgacagagggagactccatcccccagaagtagtatatccagagctgaaaatcaaatatgtctctcttcacaccagatgccttatcaaatgttgctaaataaaaccatttttatagattttatagttgtttctctttctagatgttgtgcttttcttcttgctataaatatctgtgtgctggtcatagagacaaagcaacaagctagtgtttccttctcacatgtaaagaaactttaattggtgtcagattgtgagcaaatttaaagcgcaagtgatagctgggcatggtggcacatgcctgtaacctcagccggagactgcggttgtcattgatcaattgaagaagcaaggacccgaaatcacagacattagcaatgatgtgtgaagtgatgcccacgattaatgaggacaccccaatgagccaaagggggtcccaaagcagtggctcggactcagactcccattttgagcagctgatggtgaatatgctagatgaaagggatcgtcttctagacacccttcgggagacccaggaaagcctctcacttgcccagcaaagacttcaggatgtcatctatgaccgagactcactccagagacagctcaattcagccctgccacaggatatcgaatccctaacaggagggctggctggttctaagggggctgatccaccggaatttgctgcactgacaaaagaattaaatgcctgcagggaacaacttctagaaaaggaagaagaaatctctgaacttaaagctgaaagaaacaacacaagagtaagtgtaaagcagcctttttggaattaattctatttgtagttcaatgcattacatgtaacacacatatwagaagaaaatatatgcattttaaaactttataattactttaagcagatagtaactcagttacttaaagtaaaggaggatatactataaaactcaaaacaaaaagacaggaaacctaaattatagtcacagctactaaatcactatgttgctttacaaaatgttcacattccttctggcctttactttatttggctttaaaaagaagatctggatttcaataatgggtttcaaactttcaaaaggttgttttgggggtagggtaatccctcagaggttggaaatgggcaaaagaggagagttttggaaaagaggaagagtttaaattaagggctgctacaaaagagtggcctgggtttggttctcacctcctcccagcagaagatttttttaaaaaaaaaaaaaaaaaactcgkag

SEQ ID NO: 2156 - DNA, 1500 bp, Homo sapiens
  misc_feature (1492)..(1493): n equals a,t,g, or c
ggcacatcctgctctgggcagaagggcaggacaggggccctgagtaacggtggcctggggtcagagccaggttcagctgcgaggctgctggtggctgtggagagcttggggcttccttggtcgcacccaccacctgcctgcccactggtcagccttcagggaccctgagcaccgcctggtctctttcctgtggccagcccagaactgaagcgctgcggcatggcgcgcgcctgcctccaggccgtcaagtacctcatgttcgccttcaacctgctcttctggctgggaggctgtggcgtgctgggtgtcggcatctggctggccgccacacaggggagcttcgccacgctgtcctcttccttcccgtccctgtcggctgccaacctgctcatcatcaccggcgcctttgtcatggccatcggcttcgtgggctgcctgggtgccatcaaggagaacaagtgcctcctgctcactttcttcctgctgctgctgctggtgttcctgctggaggccaccatcgccatcctcttcttcgcctacacggacaagattgacaggtatgcccagcaagacctgaagaaaggcttgcacctgtacggcacgcagggcaacgtgggcctcaccaacgcctggagcatcatccagaccgacttccgctgctgtggcgtctccaactacactgactggttcgaggtgtacaacgccacgcgggtacctgactcctgctgcttggagttcagtgagagctgtgggctgcacgcccccggcacctggtggaaggcgccgtgctacgagacggtgaaggtgtggcttcaggagaacctgctggctgtgggcatctttgggctgtgcacggcgctggtgcagatcctgggcctgaccttcgccatgaccatgtactgccaagtggtcaaggcagacacctactgcgcgtaggccgcccaccgcccgcttctctgccaaaaggacgcccacggggagatggccgcacccacagctgcctttcccaccaccagcctcggtgctctgccccatgctgggaggagggagggagggacaggtgcctggagcccccggaaccctgtttctggaaggccctrgctcaggtggcttcagggcctccggaccccccctgggaggggtggccacgtgctggctgcggaacccagggcaggggtgggaggggcctccagcactttttatatttacgtattctccaaagcagtgttcacacgggagccagcctgtggcccccagcctcctggaaaacaggttggcgctggaggagccgggtcttggcatcctggaggtggccccactggtcctggtgctccaggcggggccgtggacccctcacctacattccatagtgggcccgtggggctcctggtgcatcttaataaagtgtgagcagcaaaaaaaaaaaaaaaaaaaaaaaaaaaaaaaaaaaaaaaaaaaaaaaaaaaaaaaaaaaaaaaaaaaaaaaaaaaannaaaaaaa

SEQ ID NO: 2157 - DNA, 595 bp, Homo sapiens
gttatcctctagagtcgacctgcaggcatgcaagcttcagggttgagatgtgtataagagacaggtctaagttggactgaagttcatatagtggaatggaaaaaacctagcccagctccagggagtaatgagmtagagagagcacaccctgaggtcaccctgcttgagccagccctgcagccctctggtcctcttagctctgtcaagcacttaacaagcatgcagtcattaattgcgttcccctcagagggcaacagcatggccctgaggggactaagtgacttttgcaagaccacagcacagtgcagcccagcacgggctgggtgggatccagccttgctggcctcaaccctctctgccagcccaccaagagcctggcctgagtgccccttcttgctgccgcacaccaccagacccagttacacccataggggaaactagagctgtcagccctggctgctgtcactctgtcaaaagggcctagagctgtcagccctggctaatgtcagtctgtcaaaagggccaggtttgagacaaccatcttaccccttcttaaagcctgtctcttatacacatctcaaccatcacgataaag

SEQ ID NO: 2158 - DNA, 827 bp, Homo sapiens
gcccggtgatcctctagagtcgacctgcaggcatgcaagcttcagggttgagatgtgtataagagacagatacaaccctgatgagtttttttattatttttattttttgaggctgctggtggctagaactttgtctacaacaaatggctttttaatgtttccagtgattaagagataakagwcwkgggaaggacactgtggcaggggtcaaaggtcctaaggtctggtctagcttctgaatgatatctgcaccttttaggtcttctatttaacctcttttccttaatatcttcaccagcttctgtgcgtggcaagacctgtcatgtgtcacgggcctttccaaagacaaaatgagataacagacagaaaagaacttgggaaagttaaagataggatcaggatgcaagatgtgattggggcattattgtgttggattgcaagaagggagaggaggtgagatggtggttgaggtgtctggcgaggatttacgtgtattattggattgtcctttttttttctactgagaatatttgaacaatgccaaattaaagagcaaggcagtggcagaaggaaagagctggaatgagcgcttttgacttggctttggacagtaagctgtgttagctatgcctcactgcccaaagataaaagcagctccaagttggctgcatsaggagttgagaagcggcatgtggagcccatgaattaaagtatctggtttccctggctttwtccagcttacctgttggttgacattggatcctctgagaacacttggccctgtctcttatacacatctcaaccatcatcgatgaatggtctcaagg

SEQ ID NO: 2159 - DNA, 613 bp, Homo sapiens
  misc_feature (504)..(504): n equals a,t,g, or c
  misc_feature (588)..(588): n equals a,t,g, or c
ggccggtgacctctagagtcgacctgcaggcatgcaagcttcagggttgagatgtgtataagagacagacagtaagctgtgttagctatgcctcactgcccaaagataaaagcagctccaagttggctgcatgaggagttgagaagcggcatgtggagcccatgaattaaagtatctggtttccctggctttttccagcttacctgttggttgacattggatcctctgagaacacttggccaacccaacatctctgaaatgtagctgactctggcgtgggggctgcagctgctttcccagccttggatagacagaaagaggaaaaactggaacccacctggagctgaagggctcttataggtgggcagggcaaggaagtctctaatctacctgctgtgactgtgcacccacataacacgcccttctatctgtgttattatacactgtaaaaattgctcttatgtgtattagataccccacagcagtcttgtgaggtaaagcacncaacatatgctttgttttaagatgagactggaggcttagaggagttcaggacgtgtctagagtcacacagctgtctcttatacncatctcaaccatcatcgatgaattg

SEQ ID NO: 2160 - DNA, 385 bp, Homo sapiens
ttggagaccaattatcgatgatggttgagatgtgtakaagagacaggatcagagccatcactttgcacagccagatccgatgtcagagcactgtcatccccctgctgacctctggtttctggggagacaggctctcatctcttctgtagcttggggctgatgctgggccttggagcaagtcactgaataattgaattggaggaatccttgctgatacaaccctgatgagtttttttattattttwattttttgaggctgctggtggctagaactttgtctacaacaaatggctttttaatgtttccagkgattaagagataatagtcttgggaaggacactgtggcaggggtcaaaggctgtctcttatacacatctcaaccatc

SEQ ID NO: 2161 - DNA, 417 bp, Homo sapiens
tgatggttgagatgtgtataagagacaggtgttcgggaggcatcaggaaggaaacctttcaaaggtcaaaatggccaatcgcttccttttttctatgcccactagcacttccctgttttaagggttctaaaaataagggtccagcttccttgaggctagtgaggttggttggaaggaaaagaaagaatgtattgggggcaaagacctgaggaagaggagacctcacaggccaggagagggtctgagcctaacaccggagaagatgggacaggactcagatcagagccatcactttgcacagccagatccgatgtcagagcactgtcatycccctgctgacctctggkttctggggaracaggctctcatctcttctgtagcttggggcctgtctcttatacacatctcaaccatcat

SEQ ID NO: 2162 - DNA, 564 bp, Homo sapiens
  misc_feature (10)..(11): n equals a,t,g, or c
  misc_feature (65)..(65): n equals a,t,g, or c
  misc_feature (182)..(182): n equals a,t,g, or c
  misc_feature (202)..(202): n equals a,t,g, or c
acgaccgagnncaggagtcaggagcgaggaagcggaagagcggcccaatacgcaaccgcctctcnccgcgcgttgccgattcattaatgcagctggcacgacaggtttcccgactggaaagcgggcagtgagcgcaacgcaattaatgtgagttagtcactcattaggccccccaggctttnccactttatgctccgggttngtatgtgtgtggaattgtgagcggataacaatttcacacaggaaacagctatgaccatgattacgccaagctcgaaattaaccctcactaaagggaacaaaagctggagctccaccgcggtggcggccgctctagaactagtggatcccccgggctgcaggaattcggcacgagcccatctcaagatcatwatctgcaaagtcctttaaaaaaaaatgtataaggcggcattcacagcttctagggattaggatgtgggtgtcttttgggggatcattatttagcctatcacagctattattatattactactagcactgcccctctttaccaaagctgtctcttatacacatctcaaccat

SEQ ID NO: 2163 - DNA, 750 bp, Homo sapiens
gacctctagagtcgacctgcaggcatgcaagcttcagggttgagatgtgtataagagacagttaccaaagaggtaacaagagcaggcctggagagagggaggttgggtttgctgctctttttcttaaattctctgcctggaarggagtgaaggtcctggaggtcacctgatctagttggactccttgcccaggcttgcttccctcctctacttcaacccagaaaggctgatgtggtcggccttccccccagtaacttagaccagtatgaagaggggccctcggaggcttcagagaacaggcatttaacttcatttttgagagttgagaagaaagagcaagggcatcgggcttagctcatcagaagcttctctcttgagctttatgcctggagggctgagcataatgaaaatccaaagccccaaakagcagtgatggtctcctgggtctagaagacttggatgtgatgctttaagaaggggtaagatggttgtctcaaacctggcccttttgacagactgacattagccagggctgacagctctaggcccttttgacagagtgacagcagccagggctgacagctctagtttcccctatgggtgtaactgggtctggtggtgtgcggcagcaagaaggggcactcaggccaggctcttggtgggctggcagagaggsttgaggctgtctcttatacacatctcaaccctgaagcttgcatgcctgcaggtcgactctagaggatcaccggg

SEQ ID NO: 2164 - DNA, 446 bp, Homo sapiens
cagggttgagatgtgtataagagacagactactagcactgcccctctttaccaaagaggtaacaagagcaggcctggagagagggaggttgggtttgctgctctttttcttaaattctctgcctggaagggagtgaaggtcytgraggtcacctgatctagttggactccttgcccaggcttgcttccctcctctacttcaacccagaaaggctgatgtggtcggccttccccccagtaacttagaccagtatgaagaggggccctcggaggcttcagagaacaggcatttaacttcatttttgagagttgagaagaaagagcaagggcatcgggcttagctcatcagaagcttctctcttgagctttatgcctggagggctgagcataatgaaaatccaaagccccaaagactgtctcttatacacatctcaaccatcatcgaga

SEQ ID NO: 2165 - DNA, 436 bp, Homo sapiens
  misc_feature (386)..(386): n equals a,t,g, or c
  misc_feature (396)..(396): n equals a,t,g, or c
  misc_feature (418)..(418): n equals a,t,g, or c
  misc_feature (436)..(436): n equals a,t,g, or c
agtcgacctgcaggcatgcaagcttcagggttgagatgtgtataagagacagcctcggaggcttcagagaacaggcatttaacttcatttttgagagttgagaagaaagagcaagggcatcgggcttagctcatcagaagcttctctcttgagctttatgcctggagggctgagcataatgaaaatccaaagccccaaagagcagtgatggtctcctgggtctagaagacttggatgtgatgctttaagaaggggtaagatggttgtctcaaacctggcccttttgacagactgacattagccagggctgacagctctaggcccttttgacagagtgacagcagccagggctgacagctctagtttcccctatgggtggaactggntctgatggtnctccggcagcaaaaaggggccnctcaggccagcttcttgn

SEQ ID NO: 2166 - DNA, 500 bp, Homo sapiens
  misc_feature (8)..(8): n equals a,t,g, or c
  misc_feature (12)..(12): n equals a,t,g, or c
accattgncgancaattctcgatgatggttgagatgtgtataagagacagtccttgaggctagtgaggttggttggaaggaaaagaaagaatgtattgggggcaaagacctgaggaagaggagmcctcacaggccaggagagggtctgagcctaacaccggagaagatgggacaggrctcagatcagagccatcactttgcacagccagatccgatgtcagagcactgtcatccccctgctgacctctggtttctggggagacaggctctcatctcttctgtagcttggggctgatgctgggccttggagcaagtcactgaataattgaattggaggaatccttgctgatacaaccctgatgagttyttytattatttttattttttgaggctgctggtggctagaactttgtctacaacaaatggctttttaatgtttccagtgattaagagataatagtcttgggaaggacctgtctcttatacacatctcaaccctg

SEQ ID NO: 2167 - DNA, 530 bp, Homo sapiens
  misc_feature (403)..(403): n equals a,t,g, or c
  misc_feature (490)..(490): n equals a,t,g, or c
atgatggttgagatgtgtataagagacagtctccggtgttaggctcagaccctctcctggcctgtgaggtctcctcttcctcaggtctttgcccccaatacattctttcttttccttccaaccaacctcactagcctcaaggaagctggacccttatttttagaacccttaaaacagggaagtgctagtgggcatagaaaaaaggaagcgattggccattttgacctttgaaaggtttccttcctgatgcctcccgaacacctccttaacttggacttgcacacgagcgcacacgcacacacacaccgtgaaatcgccacttctcagtcctccatgaggcaaawtctcctatagcagtgtctaagtggactgragttcatatagkggaatggwawaaacctancccagctccagggagtaatgagctagagagagcacaccctgaggtcaccctgcttgagccagccctgcagccctctggtcctcttanctctgtcaagcacttaacaagcatgcagtcattaattgcg

SEQ ID NO: 2168 - DNA, 433 bp, Homo sapiens
tgaccaattctcgatgatggttgagatgtgtataagagacagaacttagacactgctataggagaatttgcctcatggaggactgagaagtggcgatttcacggtgtgtgtgtgcgtgtgcgctcgtgtgcaagtccaagttaaggaggtgttcgggaggcatcaggaaggaaacctttcaaaggtcaaaatggccaatcgcttccttttttctatgcccactagcacttccctgttttaagggttctaaaaataagggtccagcttccttgaggctagtgaggttggytggaaggaaaagaaagaatgtattgggggcaaagacctgaggaagaggagacctcacaggccakgagagggtctgagcctaacaccggagaakawgggacaggactcagatcagagcctgtctcttatacacatctcaaccctg

SEQ ID NO: 2169 - DNA, 440 bp, Homo sapiens
caattctcgatgatggttgagatgtgtataagagacaggggttgkawcagcaaggwttcctccaattcaattattcagtgacttgctccaaggcccagcatcagccccaagctacagaagagatgagagcctgtctccccagaaaccagaggtcagcagggggatgacagtgctctgacatcggatctggctgtgcaaagtgatggctctgatctgagtcctgtcccatcttctccggtgttaggctcagaccctctcctggcctgtgaggtctcctcttcctcaggtctttgcccccaatacattctttcttttccttccaaccaacctcactagcctcaaggaagctggacccttatttttagaacccttaaaacagggaagtgctagtgctgtctcttatacacatctcaaccctgaagcttgcatgcctgcaggtc

SEQ ID NO: 2170 - DNA, 408 bp, Homo sapiens
cagggttgagatgtgtataagagacagggggaamctagagctgtcagccctggctgctgtcactctgtcaaaagggcctagagctgtcagccctggctaatgtcagtctgtcaaaagggccaggtttgagacaaccatcttaccccttcttaaagcatcacatccaagtcttctagacccaggagaccatcactgctctttggggctttggattttcattatgctcagccctccaggcataaagctcaagagagaagcttctgatgagctaagcccgatgcccttgctctttcttctcaactctcaaaaatgaagttaaatgcctgttctctgaagcctccgagggcccctcttcatactggtctaagttactgtctcttatacacatctcaaccatcacgataaatg

SEQ ID NO: 2171 - DNA, 494 bp, Homo sapiens
tgaccaattatcgatgatggttgagatgtgtataagagacagcttaacaagcatgcagtcattaattgcgttcccctcagagggcaacagcatggccctgaggggactaagtgacttttgcaagaccacagcacagtgcagcccagcacgggctgggtgggatccagccttgctggcctcaaccctctctgccagcccaccaagagcctggcctgagtgccccttcttgctgccgcacaccaccagacccagttacacccataggggaaactagagctgtcagccctggctgctgtcactctgtcaaaagggcctagagctgtcagccctggctaatgtcagtctgtcaaaagggccaggtttgagacaaccatcttaccccttcttaaagcatyacatccaagtcttctagacccaggagaccatcactgctctttggggctgtctcttatacacatctcaaccctgaagcttgcatgccgcaggtcgacgta

SEQ ID NO: 2172 - DNA, 453 bp, Homo sapiens
cagggttgagatgtgtataararacaggttgtagacaaagttctagccaccagcagcctcaaaaaataaaaataataaaaaaactcatcagggttgtatcagcaaggattcctccaattcaattattcagtgacttgctccaaggcccagcatcagccccaagctacagaagagatgagagcctgtctccccagaaaccagaggtcagcagggggatgacagtgctctgacatcggatctggctgtgcaaagtgatggctctgatctgagtcctgtcccatcttctccggtgttaggctcagaccctctcctggcctgtgaggtctcctcttcctcaggtctttgcccccaatacattctttcttttccttccaaccaacctcactagcctcaaggactgtctcttatacacatctcaaccctgaagcttgcatgcctgcaggtcgactctag

SEQ ID NO: 2173 - DNA, 1365 bp, Homo sapiens
ggcacgagtgcttgtacttgtgaacaccagagtttcctgcaatggatcaaggaccagaggcagctcttggtggaagttgaacgaatggaatgtgcaacaccttcagataagcagggcatgcctgtgctgagtttgaatatcacctgtcagatgaataagaccatcattggtgtgtcggtcctcagtgtgcttgtagtatctgttgtagcagttctggtctataagttctattttcacctgatgcttcttgctggctgcataaagtatggtagaggtgaaaacatctatgatgcctttgttatctactcaagccaggatgaggactgggtaaggaatgagctagtaaagaatttagaagaaggggtgcctccatttcagctctgccttcactacagagactttattcccggtgtggccattgctgccaacatcatccatgaaggtttccataaaagccgaaaggtgattgttgtggtgtcccagcacttcatccagagccgctggtgtatctttgaatatgagattgctcagacctggcagtttctgagcagtcgtgctggtatcatcttcattgtcctgcagaaggtggagaagaccctgctcaggcagcaggtggagctgtaccgccttctcagcaggaacacttacctggagtgggaggacagtgtcctggggcggcacatcttctggagacgactcagaaaagccctgctggatggtaaatcatggaatccagaaggaacagtgggtacaggatgcaattggcaggaagcaacatctatctgaagaggaaaaataaaaacctcctgaggcatttcttgcccagctgggtccaacacttgttcagttaataagtattaaatgctgccacatgtcaggccttatgctaagggtgagtaattccatggtgcactagatatgcagggctgctaatctcaaggagcttccagtgcagagggaataaatgctagactaaaatacagagtcttccaggtgggcatttcaaccaactcagtcaaggaacccatgacaaagaaagtcatttcaactcttacctcatcaagttgaataaagacagagaaaacagaaagagacattgttcttttcctgagtcttttgaatggaaattgtattatgttatagccatcataaaaccattttggtagttttgactgaactgggtgttcactttttcctttttgattgaatacaatttaaattctacttgatgactgcagtcgtcaaggggctcctgatgcaagatgccccttccattttaagtctgtctccttacagaggttaaagtctagtggctaattcctaaggaaacctgattaacacatgctcacaaccatcctggtcatt

SEQ ID NO: 2174 - DNA, 633 bp, Homo sapiens; identical to SEQ ID NO: 1831
  misc_feature (628)..(628): n equals a,t,g, or c

SEQ ID NO: 2175 - DNA, 2128 bp, Homo sapiens
  misc_feature (4)..(4): n equals a,t,g, or c
  misc_feature (6)..(6): n equals a,t,g, or c
  misc_feature (10)..(10): n equals a,t,g, or c
  misc_feature (33)..(33): n equals a,t,g, or c
  misc_feature (2125)..(2125): n equals a,t,g, or c
  misc_feature (2128)..(2128): n equals a,t,g, or c
acgngnaganctttctacttggtaatggggcanattgctcgtaagatttttaaaaactggctagtgaaaggaaagtacctctgaaagaaaccattttagcaaattatggttatatgttttaatgtaatctacagaatgttttatagtaaaattctagcaccactagaataatcacatagcatgtacaatatatttatgctggctgaaaagacagaatctgggaataataaaattgcaaccagtttggtaatgcaaacagcagaatagaatgaaatctcagtaatgaattaaagcaacaaaaagatattgattggcaaaaagcaagatataagagatkcatttgcttaacatytctacataatatttatggtctggtcagtattggtctggtcagtattgcctggctgacgtgaaatgtaaactagtaggcrtgttattgatctgctaaaactaaccctctttttaagaggagatttaaggaagacgtcaatcaaaatgtcaaatatgtgtgtcagaatataaataatttttcacattgtattgttgctatataaaaaaaataatagaattggttgggtttctgaggtgaaatccagagtaagagtactagacagttcaacaagccacatctaatggcacagatagaggatgtagctattttatacctttcataacatttgagagtaagatatccttcaggatgtgaagtgattattaagtactcatacctgaaatctgttgtcaagattagaactggggttcatgttaaaaaccttccatattacctgagggtacctgtggggaacagttccttcccctgtgtggtagtattttgttggaagagaatgtttatacraaaaatgaaattcttccaacagcagagaaactctaaaaagtttgatagtacctatcaaagtgctgtacttctgtgatagagaacatctgatgtaccaatttagatctatttctttatactttttctaaycaattgcttaatagtactttggatgattatcacctttgccacttaaaatatataaatatcctttttacttcatgaggaaggaggaattttttgataattactgagttcagccttttgtgatgacttatattttggacttacattttaactttaaagaatgtcagatcccttctttgtcttactagttaaatcctcacctaatctcttgggtatgaatataaatgtgtgtcatcgttatattgttcagctagatgagcaagtatcttagggtagtaggtagcctggtggttttagaagtgtttggtgatttttayggagagagttttcctaagtggtggtttataggtggtatcagatattattagggcagctttttggggagtaatctcaggtctcccagagcagcagcatttttctcattgatataagtaagattcttaggagcttttcttatcacacaagatgcctgaatcgaatgtgagaattgaaggcatttcttctgcataaacaaagaattctacctgctggacagaaacctggaaagttctttggaattcgctgaattacagtttagtatgtcctgattacagagtgacaatatttatcaagcctttgttatattggattatcttctctcttaaaatacaactgtattataattgaaatgacagcccaaaattggatggtttaccaaaaccaatgaaagggatttcacacatcaatttttatttctgttttgaagagcacatgctatataataattgctagtagcaactgcagtaaaacaggtgataagttattttctctgaaaagatccagtcctagagcaggattcttcgatcattcatggcagagtgaaaaaggtttgtatggttcttgtccaaataactcagttcttaaaattcttaaaatgatcgtaaaccattatcctttaaaggtttatttgaagatgctgttaaagtacagaattttgtgtacaggtagatttttccgtccctcattaatagtgccttcttaattaatacagactggtgttagctataacaaaactccagtaaggccaaagaatcccaagttctttgtggaaaaaaaaaaaaaaaaaactcgagggggggcccgtacccaatcgccctcacatgnatn

SEQ ID NO: 2176 - DNA, 1709 bp, Homo sapiens
ggcacgagctggagtcggagttgtaacgctccactgactgatagagcgaccggccgaccatggcgcccggagtggcccgcgggccgacgccgtactggaggttgcgcctcggtggcgccgcgctgctcctgctgctcatcccggtggccgccgcgcaggagcctcccggagctgcttgttctcagaacacaaacaaaacctgtgaagagtgcctgaagaacgtctcctgtctttggtgcaacactaacaaggcttgtctggactacccagttacaagcgtcttgccaccggcttccctttgtaaattgagctctgcacgctggggagtttgttgggtgaactttgaggcgctgatcatcaccatgtcggtagtcgggggaaccctcctcctgggcattgccatctgctgctgctgctgctgcaggaggaagaggagccggaagccggacaggagtgaggagaaggccatgcgtgagcgggaggagaggcggatacggcaggaggaacggagagcagagatgaagacaagacatgatgaaatcagaaaaaaatatggcctgtttaaagaagaaaacccgtatgctagatttgaaaacaactaaagcgctccagcacatcagtcccgacgcttcctgtgaggtgcacgctccgcagcccagcccagccgggagaccacgtggccattgcggtctcctgaccttggccagtgaacctgccagccttccaggacaggcggccggagagctgcccctgaaggacagtcctctcgtcttgcagactggtgaccttctattccctgttcatctctgtttctagatttagtcacttgaaataagaaatctttggggtttgggcttttttatactcttctcagtttgtgaaacgctaactgcacacgaagccgcctgacggcacccagcgctgtggctgtcattctcccagggcagaaccctgcgtttctctctgtccactaacaagcttcacacgcaacacagggaagtcggtttgacttttgtcatgaggagaactgaccagccctcatcattccccataaaaccacggacagcgtctgtgtgcgcatcttgagtcttcacacctgttgactcacacggcttttgctgatgacacggggctccagtacacagtctgataaggacttaacgtcctaacctcaattgtattaaatagcattggggaatagctaaacctttttaaaaaaatttattggattttcctccctgcttaaaagatttcaccagaaaaccttcatataaaaattcaggccctttttggacaatttttaaaatttgtatctttactagaacatgagaatctttttcccttggaagcttgaattataaatgtggtgtttggcctgcctcagcagcaccagttgactgctcgtgtgccagcggtgtggggaggacggggcaggaacgctgcagctctctccagccctgttggcatcctcagtgcctgcaggcctctcgctgcctgttgggctgtctggggggtggccatttagggatcgtggggacggggtccaccccaagaagaaagaaaggcccgtccacaggcccggctctgggccacgtgccccggaagccaggtgtgtgccagagtgcagctgagggctctccccacaccacccagcaggcgctggtgctccttctgcctcatgggaccagtccagcttccagccgctctgg

SEQ ID NO: 2177 - DNA, 1607 bp, Homo sapiens; identical to SEQ ID NO: 2024

SEQ ID NO: 2178 - DNA, 2620 bp, Homo sapiens; identical to SEQ ID NO: 2025

SEQ ID NO: 2179 - DNA, 3011 bp, Homo sapiens
  misc_feature (25)..(25): n equals a,t,g, or c
  misc_feature (2933)..(2933): n equals a,t,g, or c
  misc_feature (2967)..(2967): n equals a,t,g, or c
  misc_feature (2999)..(2999): n equals a,t,g, or c
cacaggaatcagctatgaccatgantacgccaagctcgaaattaaccctcactaaagggaacaaaagctggagctccaccgcggtggcggccgctctagaactagtggatcccccgggctgcaggaattcggcacgagccgcctgaagcttctcaactcaagccagacaggcagcaattccagagtcgaaagaggccttatgaagaaaaccggggacgggggtactttgagcaccgagaggataggaggggccgctctcctcagcctcctgctgaagaggatgaagatgactttgatgatacccttgttgctattgacacctataactgcgacctccacttcaaggtggcccgagatcggagtagtggctatccgctcacaattgagggctttgcatacctgtggtcaggagcccgtgccagctatggggtcagaaggggccgtgtatgcttcgagatgaagatcaatgaggaaatctccgtgaagcaccttccgtctacagagcctgacccccacgtggtccgtatcggctggtccctggactcctgcagcacccagctaggcgaagagcctttctcctatggctatggaggcactgggaagaagtccaccaatagccggtttgaaaactacggagacaagtttgcagagaacgatgtgattggctgctttgcggattttgaatgtggaaatgacgtggaactgtcttttaccaagaatggaaagtggatgggcattgctttccgaatccagaaggaagccttggggggtcaggccctctatcctcatgtcctggtgaagaattgcgcagtggagttcaacttcggacagagagcagagccctactgttctgtcctcccggggtttaccttcatccagcaccttccccttagtgagcgtatccggggcaccgttggaccaaagagcaaggcagaatgtgagattctgatgatggtgggcctgcctgctgctggcaagaccacatgggccatcaaacatgcagcctccaacccttccaagaagtacaacatcctgggtaccaatgccatcatggataagatgcgggtgatgggcctacgccggcagcggaactatgctggccgctgggatgtcctgatccagcaggccacccagtgcctcaaccgcctcatccagattgctgcccgcaagaaacgcaactatatcctagatcagacaaatgtttatgggtcagcccagagacgaaaaatgagaccatttgaaggcttccagcgcaaagctattgtaatttgtcccactgacgaggacctaaaagaccgaacaataaagcgaaccgacgaggaagggaaggatgtcccagatcatgcggtcttagaaatgaaagccaacttcacgttgccagatgttggggacttcctggatgaggttctgttcattgagctgcagcgggaggaagcggacaagctagtgaggcagtacaacgaggaaggccgcaaggctgggccaccccctgaaaagcgctttgacaaccgaggtggtggtggcttccggggccgcgggggtggtggtggcttccagcgctatgaaaaccgaggaccccctggaggcaaccgtggcggcttccagaaccgagggggaggcagcggtggaggaggcaactaccgaggaggtttcaaccgcagcggaggtggtggctatagccagaaccgctggggtaacaacaaccgggataacaacaactccaacaacagaggcagctacaaccgggctccccagcaacagccgccaccacagcagcctccgccaccacagccaccaccccagcagccaccgccaccacccagctacagccctgctcggaaccccccaggggccagcacctacaataagaacagcaacatccctggctcaagcgccaataccagcacccccaccgtcagcagctacagccctccacagccgagttacagccagccaccctacaaccagggaggttacagccagggctacacagccccaccgcctccacctccaccaccacctgcctacaactatgggagctacggcggttacaacccggccccctataccccaccgccaccccccaccgcacagacctaccctcagcccagctataaccagtatcagcagtatgcccagcagtggaaccagtactatcagaaccagggccagtggccgccatactacgggaactacgactacgggagctactccgggaacacacagggtggcacaagtacacagtagccagtgtgacccagaggctcccggaggcccctgccggcttcctccaccagcgcctgcctcggcccctcctctgcccccgccagatcccgtggtgctggggatggggtcatcccagggctgcctccctccagcccactgcctcccctctgaggggcttccttcccctccatagggccaggcatttttttctggattcaaacaggcaacaatgaccttttattttctgtttgtccccacctccccagccttccacctcctgttcttcctaccttcttcctttttgactaaataatccccacctcccttgatcatacagtgaggctacagtgactgaggggagaatcccctcctgttcactctcccaaccctgctccagcccctcagcttcccagaccctcatgcagttggttgtaaattctcccaggagctgttttactgtctacttttcaggattaaaaaaaaaatcaaaacttaaaaaaaaaaaagtttaaaaagcaaaatggggagggggaggaagcagtgacttttttttggtaattatgcgcttttttttaatttttagaatttgtctttttactgtgggtgggctgttgatatttcatcaagataagcatttctttcctgagttcaggtgactgaggaagagccacaagaacaaaacwccatctcaagaaaaacccccaggnttcctctttttaaccccaacttttttttaccggntggcccccagtttcccccttaacttttggcancacaagggtttt

SEQ ID NO: 2180 - DNA, 148 bp, Homo sapiens
ggagatcccctctgttactctcccaaccctgctccagcccctcagcttcccagaccctcatgcagttggttgtaaattytcccaggagctgttttactgtytamttttcaggaaaaaaaaaaaaaaaaactggaggggggcccggtac

SEQ ID NO: 2181 - DNA, 2586 bp, Homo sapiens
ggcacgagccgcctgaagcttctcaactcaagccagacaggcagcaattccagagtcgaaagaggccttatgaagaaaaccggggacgggggtactttgagcaccgagaggataggaggggccgctctcctcagcctcctgctgaagaggatgaagatgactttgatgatacccttgttgctattgacacctataactgcgacctccacttcaaggtggcccgagatcggagtagtggctatccgctcacaattgagggctttgcatacctgtggtcaggagcccgtgccagctatggggtcagaaggggccgtgtatgcttcgagatgaagatcaatgaggaaatctccgtgaagcaccttccgtctacagagcctgacccccacgtggtccgtatcggctggtccctggactcctgcagcacccagctaggcgaagagcctttctcctatggctatggaggcactgggaagaagtccaccaatagccggtttgaaaactacggagacaagtttgcagagaacgatgtgattggctgctttgcggattttgaatgtggaaatgacgtggaactgtcttttaccaagaatggaaagtggatgggcattgctttccgaatccagaaggaagccttggggggtcaggccctctatcctcatgtcctggtgaagaattgcgcagtggagttcaacttcggacagagagcagagccctactgttctgtcctcccggggtttaccttcatccagcaccttccccttagtgagcgtatccggggcaccgttggaccaaagagcaaggcagaatgtgagattctgatgatggtgggcctgcctgctgctggcaagaccacatgggccatcaaacatgcagcctccaacccttccaagaagtacaacatcctgggtaccaatgccatcatggataagatgcgggtgatgggcctacgccggcagcggaactatgctggccgctgggatgtcctgatccagcaggccacccagtgcctcaaccgcctcatccagattgctgcccgcaagaaacgcaactatatcctagatcagacaaatgtttatgggtcagcccagagacgaaaaatgagaccatttgaaggcttccagcgcaaagctattgtaatttgtcccactgacgaggacctaaaagaccgaacaataaagcgaaccgacgaggaagggaaggatgtcccagatcatgcggtcttagaaatgaaagccaacttcacgttgccagatgttggggacttcctggatgaggttctgttcattgagctgcagcgggaggaagcggacaagctagtgaggcagtacaacgaggaaggccgcaaggctgggccaccccctgaaaagcgctttgacaaccgaggtggtggtggcttccggggccgcgggggtggtggtggcttccagcgctatgaaaaccgaggaccccctggaggcaaccgtggcggcttccagaaccgagggggaggcagcggtggaggaggcaactaccgaggaggtttcaaccgcagcggaggtggtggctatagccagaaccgctggggtaacaacaaccgggataacaacaactccaacaacagaggcagctacaaccgggctccccagcaacagccgccaccacagcagcctccgccaccacagccaccaccccagcagccaccgccaccacccagctacagccctgctcggaaccccccaggggccagcacctacaataagaacagcaacatccctggctcaagcgccaataccagcacccccaccgtcagcagctacagccctccacagccgagttacagccagccaccctacaaccagggaggttacagccagggctacacagccccaccgcctccacctccaccaccacctgcctacaactatgggagctacggcggttacaacccggccccctataccccaccgccaccccccaccgcacagacctaccctcagcccagctataaccagtatcagcagtatgcccagcagtggaaccagtactatcagaaccagggccagtggccgccatactacgggaactacgactacgggagctactccgggaacacacagggtggcacaagtacacagtagccagtgtgacccagaggctcccggaggcccctgccggcttcctccaccagcgcctgcctcggcccctcctctgcccccgccagatcccgtggtgctggggatggggtcatcccagggctgcctccctccagcccactgcctcccctctgaggggcttccttcccctccatagggccaggcatttttttctggattcaaacaggcaacaatgaccttttattttctgtttgtccccacctccccagccttccacctcctgttcttcctaccttcttcctttttgactaaataatccccacctcccttgatcatacagtgaggctacagtgactgaggggagaatcccctcctgttcactctcccaaccctgctccagcccctcagcttcccagaccctcatgcagttggttgtaaattctcccaggagctgttttactgtctacttttcaggaaaaaaaaaaaaaaaaaa

SEQ ID NO: 2182 - DNA, 2660 bp, Homo sapiens
  misc_feature (2634)..(2634): n equals a,t,g, or c
  misc_feature (2637)..(2637): n equals a,t,g, or c
aggcttttgcaaaaagctatttaggtgmcactatagaaggtacgcctgcaggtaccggtccggaattcccgggtcgacccacgcgtccgcccacgcgtccgcccacgcgtccgcggacgcgtgggttaggccctaatataaaaagcattgtcaccatgttgatgctgatgctattgatgatgtttgctgtccactgtacctgggtcacaagcaatgcctactctagtccaagtgtagtcctggcctcatacaatcatgatggcaccaggaatatcttagatgattttagagaagcttacttttggctaaggcaaaatacagatgaacatgcacgagtaatgtcttggtgggattatggctatcagatagctggaatggctaatagaactacgttggtggataataacacctggaataacagccacatagcactggtgggaaaagctatgtcttctaatgaaacagcagcctataaaatcatgaggactctagatgtagattatgttttggttatttttggaggggttattggctattctggtgatgatatcaacaaatttctctggatggttaggatagctgaaggagaacatcccaaagacattcgggaaagtgactattttaccccacagggagaattccgtgtagacaaagcaggatcccctactttgktgaattgccttatgtataaaatgtcatactacagatttggagaaatgcagctggattttcgtacacccccaggttttgaccgaacacgtaatgctgagattggaaataaggacattaaattcaaacatttggaagaagcctttacatcagaacactggcttgttaggatatataaagtaaaagcacctgataacagggagacattagatcacaaacctcgagtcaccaacattttcccaaaacagaagtatttgtcaaagaagactaccaaaaggaagcgtggctacattaaaaataagctggtttttaagaaaggcaagaaaatatctaagaagactgtttaaatgcactgttctggttcctaacttgaagcagttgtccttgtgagaaccggtctttgcctttagctcatgtcgtgtttcacagcaaagagggtacagaaccatcactggtccaggttaatgtacaaaattttctggcaatgcctgattaaaaaaataaaattggcttgttgagaacagctgttttcgatttctaatgtgaagcaagacagagcactgctgtaaatgtctagcagcagattttttttttattggtacatattatccttcaaatctgagaatttggactaactgcaccaaagaaccctctaatttggtccctggcacatgcatacttgtcaatgtttttattcttttacaagacctgcattttatttgaattacccgaatagcaatatgtaaaatacaagtgacaaaatgtgatgagagcttcttgaaccggtaaactagtacaggtctgagaaagacatattagaagaatcattatacttccttgaattatatttattttcatgtttctctaatgcaaagaatgtttcatcaaatgtatattttctgttgcttactgtttgctctgagaagaagctgctgtttcaaagatggacctctgagtagctaattgattcaagtagtttttttatgttgacacattattactgctgttagcagtcgttttcaccaggtacttacagagcagatttcatacatcattcattcaagggctaaatttatattttttggaaatcatggcaactacacaggatgttgcttaccaggacggagttttggtatcttagtactgaagttagcactatgtttacatgcaaaagattaaggaaaaaacccttaaagtggacaggtatccaaagttcattttctgtgactcatcaaagtgacaaaagacttgtaacaactttgcctggacttttttcattttacaacagttcatccattcacaatgattttgttctctgctccatattttttaatcccttaagcatttgatgaaacactctttagtgctatatgcattttcttacttttgttaaaaatgtgacaattgtcaaaaaatgcactaaaatgtaaatggagattgaacaagttcactttccagcttataggcaactttatacagacttgaacattttctccagttgtttagtaaaagtgaaagagaaagggtttttcctgccacaggatataacttttttttatataacaagcataacacaccactgcttttggtggaaaagtgcagaatagtatgtaccttttatgaagaaaaatgtaatttacaatattcagtgagaatgttactgctgattttcttttccaaggtgtagaatattctttgatttatagaattcatttttgacccagatgatggttcctttacagaacaataaaatggctgaacattttcacaaatagagtgtaacgaagtctggatttctgataccttgtcatttgggggattttattttactttgttgctttaaaattcaatgcagagaagttgttgactgtaggggaaataaagttaattcaaatttaaaaaaaaaaaaaaaaaaaaaaaaaaaaaaaaaagggcggccgctctagaggatccctcgaggggccncangttacgcgtgcatgcgacgtcat

SEQ ID NO: 2183 - DNA, 338 bp, Homo sapiens
  misc_feature (323)..(323): n equals a,t,g, or c
ggcacagaaggcaggtaaagtgaggaaacatgcaactgaacaggaaaaaactgaagagggattaggccctaatataaaaagcattgtcaccatgttgatgctgatgctattgatgatgtttgctgtccactgtacctgggtcacaagcaatgcctactctagtccaagtgtagtcctggcctcatacaatcatgatggcaccaggaatatcttagatgattttagagaagcttacttttggctaaggcaaaatacagatgaacatgcacgagtaatgtcttggtgggattatggctatcagatagctggatggctaatagaantacgttgggtggata

SEQ ID NO: 2184 - DNA, 2139 bp, Homo sapiens
  misc_feature (9)..(9): n equals a,t,g, or c
acgcgtaantttgggcccctcgagggatcctctagagcggccgccctttttttttttttttttacacagtaaatattttattttaataatagcatagaattcttctgaagaaaattgttatacattatagctattattttacagtaacagagagaaaataaaattagagatacaaatattaaaggccaattatcaaaatgaaattaacacagattattattcatatgaacaatgtaaacagaatcatctatttgatttaacatcaaatatatttttggcatataattatttttacaatgagaattattaattattcaaccaattcaaatatactcattcagccaaaagaacaaaataagcctcttagaaattcaagatttatagattgatattaaacattttctcaatacatagaatattctgatctccattgagttaaactgtacaaacactcatatctattgttttatagcttataattaggtatagcttgtcaccagaactccttgtccaaaatatcactattaattgtacgaggcaaagtcctataataaaattactgtaataatggccacatcttttcaaaaacagaatatggaagtttccattttcatgactatgaatctggttttccaaaattgggttcccaaatccagtttctaaatgtttcaacagaggtgagaaagtaaaggaaataaatgatttaatggaactctggaaaaaaaactatcatagatcttagtttgaaaaatacatcaaacatgagakataccatgaatgactcagaattatataataatgcctatatcaaactttattagttagctaaagggcaaagartaagaggcaagttaaaggtaatacttgcttttaacaaagcagactaagtaatatgttaagtgttagggtgggataggaaagaactcaggcatggcaaaartctcctcttgggctttctatataaacatctattttagttttggactgttcaccgagaggagctctccctatccatgaaatgcttcccagaccaacaggtcttggtctagcagctgtaggaaggcagcagtatgaaaatgtaggaaatggaagccaatttgtgtccaaagttagtccaccctaactggactctttttaaactgggttattcaaatgccagcaaaaagtacaggctctagctaaagaacatgaatagacatctgtcttaaaaatgcctggaagaggtcatgattattggccttatgttctcccagaataagaacttacaaagtcctggaaatcctcagctctctccagccacctttccaaataaaatcttaatgaatatattttaaatcctttattgggctctgtaatcccttcaaccaaatagccaagctgcaatcgttttatgtaacatctgtttcactggaaaatgtgggaagttattttgatattgyctagcaagatcaataagtaaacactgatcaccccaagccaaatgatattgcccttcagggagcttttagaaagaaaataaactgataaaccaagaaagcagattgtatgcatagcaaagcccttcagcacagtgcaaacatgttctttatgaggaggtgcaaacccacttggtaatttcaagtgagaggcaacagaagtctttcttaatccaaagtcagaagtttccgaagaacttcaagcacaatatcgtaacaaaagtgatactgctccttcgtttgaaccatgccagaacgttgttctctcatttgggccactatatccatgatgttgaaatggaagaatatctcggtatctgtttttttctctgttgcttggttgattcccagagttgaactcaccaggcagattcttaagttctaaagccataaattcctgcatgatatcatacgctgctgttttttcctcaaggattttcaaacaatccttgatggctgtctgctcatgaaaattgaatattaatggccgaatctgagccaactgatctagttctccttcagaaacaattttgcgcgtatctgggcctgcggggccgccccaactgtcccgctgcaacccggacgcgtgggtcgacccgggaattccggaccggtacctgcaggcgtaccttctatagtgtcacctaaaagcttttgcaaaagc

SEQ ID NO: 2185 - DNA, 546 bp, Homo sapiens
  misc_feature (41)..(41): n equals a,t,g, or c
  misc_feature (94)..(94): n equals a,t,g, or c
  misc_feature (124)..(124): n equals a,t,g, or c
  misc_feature (169)..(169): n equals a,t,g, or c
  misc_feature (366)..(366): n equals a,t,g, or c
cctgtccgcctttctccctttcggggaagcgtggcgctttntcatagctcacgctgtaggtatctcagttcggtgtaggtcgttcgctccaagntgggctgtgtgcacgaaccccccgttcagnccgaccgctgcgccttatccggtaactatcgtcttgagtccaacncggtaaggcacgacttatcgccactggcagcagccactggtaacaggattagcagagcgaggtatgtagscggtgctacagagttcttgaagtggtggcctaactacggctacactagaagaacagtatttggtatctgcgctctgctgaagccagttaccttcggaaaaagagttggtagctcttgatccggcaancaaaccaccgctggtagcggtggtttttttgtttgcaagcagcagattacgcgcagaaaaaaaggatctcaagaagatcctttgatcttttctacggggtctgacgctcagtggaacgaaaactcacgttaagggattttggtcatgagattatcaaaaaggatcttcacctagatcctt

SEQ ID NO: 2186 - DNA, 2467 bp, Homo sapiens
  misc_feature (2447)..(2448): n equals a,t,g, or c
  misc_feature (2452)..(2452): n equals a,t,g, or c
  misc_feature (2462)..(2462): n equals a,t,g, or c
ggaattcggcacgagcagcattggcccagatgtaactgacatcctttcagacattgcagaagaagcttctaaacttcccagcactagtgatgattgcccagccattggcacccctcttcgagattcttcaagctctgggcattctcagagtaccctgtttgactctgatgtctttcaaactaacaataatgaaaatccatacactgatccagctgatcttattgcagatgctgctggaagccccagtagtgactctcctaccaatcatttttttcatgatggagtagatttcaatcctgatttattgaacagccagagccaaagtggttttggagaagaatattttgatgaaagcagccaaagtggggataatgatgatttcaaaggatttgcatctcaggcactaaatactttgggggtgccaatgcttggaggtgataatggggagaccaagtttaagggcaataaccaagccgacacagttgatttcagtattatttcagtagccggcaaagctttagctcctgcagatcttatggagcatcacagtggtagtcagggtcctttactgaccactggggacttagggaaagaaaagactcaaaagagggtaaaggaaggcaatggcaccagtaatagtactctctcggggcccggattagacagcaaaccagggaagcgcagtcggaccccttctaatgatgggaaaagcaaagataagcctccaaagcggaagaaggcagacactgagggaaagtctccatctcatagttcttctaacagaccttttaccccacctaccagtacaggtggatctaaatcgccaggcagtgcaggaagatctcagactcccccaggtgttgccacaccacccattcccaaaatcactattcagattcctaagggaacagtgatggtgggcaagccttcctctcacagtcagtataccagcagtggttctgtgtcttcctcaggcagcaaaagccaccatagccattcttcctcctcttcctcatctgcttccacctcagggaagatgaaaagcagtaaatcagaaggttcatcaagttccaagttaagtagcagtatgtattctagccaggggtcttctggatctagccagtccaaaaattcatcccagtctggggggaagccaggctcctctcccataaccaagcatggactgagcagtggctctagcagcaccaagatgaaacctcaaggaaagccatcatcacttatgaatccttctttaagtaaaccaaacatatccccttctcattcaaggccacctggaggctctgacaagcttgcctctccaatgaagcctgttcctggaactcctccatcctctaaagccaagtcccctatcagttcaggttctggtggttctcatatgtctggaactagttcaagctctggcatgaagtcatcttcagggttaggatcctcaggctcgttgtcccagaaaactcccccatcatctaattcctgtacggcatcttcctcctccttttcctcaagtggctcttccatgtcatcctctcagaaccagcatgggagttctaaaggaaaatctcccagcagaaacaagaagccgtccttgacagctgtcatagataaactgaagcatggggttgtcaccagtggccctgggggtgaagacccactggacggccagatgggggtgagcacaaattcttccagccatcctatgtcctccaaacataacatgtcaggaggagagtttcagggcaagcgtgagaaaagtgataaagacaaatcaaaggtttccacctccgggagttcagtggattcttctaagaagacctcagagtcaaaaaatgtggggagcacaggtgtggcaaaaattatcatcagtaagcatgatggaggctcccctagcattaaagccaaagtgactttgcagaaacctggggaaagtagtggagaagggcttaggcctcaaatggcttcttctaaaaactatggctctccactcatcagtggttccactccaaagcatgagcgtggctctcccagccatagtaagtcaccagcatataccccccagaatctggacagtgaaagtgagtcaggctcctccatagcagagaaatcttatcagaatagtcccagctcagacgatggtatccgaccacttccagaatacagcacagagaaacataagaagcacaaaaaaaaaraaraaagtaaaagacaaagatagggaccgagaccgggacaaagaccgagacaagaaaaaatctcatagcatcaagccagagagttggtccaaatcacccatctcttcagaccagtccttgtctatgacagtaacacaatcttatctgcagacagaccctcaaggctcagcccagactttatgattggggagggaagattatyttagctatttatttggaatattttaaccctttatctgnntggntttatacagnggttc

SEQ ID NO: 2187 - DNA, 1007 bp, Homo sapiens; identical to SEQ ID NO: 1799
  misc_feature (10)..(10): n equals a,t,g, or c
  misc_feature (14)..(14): n equals a,t,g, or c

SEQ ID NO: 2188 - DNA, 1865 bp, Homo sapiens
  misc_feature (4)..(4): n equals a,t,g, or c
  misc_feature (1769)..(1769): n equals a,t,g, or c
  misc_feature (1843)..(1843): n equals a,t,g, or c
ggtncacgtagagaaggtctccgtgcaggtaccggtccggaattccgggtcgacccacgcgtccgcctgcatcccggacctgcggcgaccgtcgtacaccatgggcctccacctccgcccctaccgtgtggggctgctcccggatggcctcctgttcctcttgctgctgctaatgctgctcgcggacccagcgctcccggccggacgtcaccccccagtggtgctggtccctggtgatttgggtaaccaactggaagccaagctggacaagccgacagtggtgcactacctctgctccaagaagaccgaaagctacttcacaatctggctgaacctggaactgctgctgcctgtgcatcattgactgctggattgacaatatcaggctggtttacaacaaaacatccagggccacccagtttcctgatggtgtggatgtacgtgtccctggctttgggaagaccttctcactggagttcctggaccccagcaaaagcagcgtgggttcctatttccacaccatggtggagagccttgtgggctggggctacacacggggtgaggatgtccgaggggctccctatgactggcgccgagccccaaatgaaaacgggccctacttcctggccctccgcgagatgatcgaggagatgtaccagctgtatgggggccccgtggtgctggttgcccacagtatgggcaacatgtacacgctctactttctgcagcggcagccgcaggcctggaaggacaagtatatccgggccttcgtgtcactgggtgcgccctgggggggcgtggccaagaccctgcgcgtcctggcttcaggagacaacaaccggatcccagtcatcgggcccctgaagatccgggagcagcagcggtcagctgtctccaccagctggctgctgccctacaactacacatggtcacctgagaaggtgttcgtgcagacacccacaatcaactacacactgcgggactaccgcaagttcttccaggacatcggctttgaagatggctggctcatgcggcaggacacagaagggctggtggaagccacgatgccacctggcgtgcagctgcactgcctctatggtactggcgtccccacaccagactccttctactatgagagcttccctgaccgtgaccctaaaatctgctttggtgacggcgatggtactgtgaacttgaagagtgccctgcagtgccaggcctggcagagccgccaggagcaccaagtgttgctgcaggagctgccaggcagcgagcacatcgagatgctggccaacgccaccaccctggcctatctgaaacgtgtgctccttgggccctgactcctgtgccacaggactcctgtggctcggccgtggacctgctgttggcctctggggctgtcatggcccacgcgttttgcaaagtttgtgactcaccattcaaggccccgagtcttggactgtgaagcatctgccatggggaagtgctgtttgttatcctttctctgtggcagtgaagaaggaagaaatgagagtctagactcaagggacactggatggcaagaatgctgctgatggtggaactgctgtraccttaggactggctccacagggtggactggctgggccctggtcccagtccctgcctggggccatgtgtcccccctattcctgtgggcttttcatacttgcctactggccctggccccgcagccttcctatgagggatgttactggctgtggcctgtacccagaggtccarggatcggntctggcctcggtgaccttcacaacagcaaatagctgcatggatggagtaactgtgctctgggtatgggcactgntgtttggcactgatctagagca

SEQ ID NO: 2189 - DNA, 857 bp, Homo sapiens
  misc_feature (31)..(31): n equals a,t,g, or c
  misc_feature (58)..(58): n equals a,t,g, or c
  misc_feature (61)..(62): n equals a,t,g, or c
  misc_feature (68)..(68): n equals a,t,g, or c
  misc_feature (116)..(116): n equals a,t,g, or c
  misc_feature (166)..(166): n equals a,t,g, or c
cccccgaagttcttggaacttgtgaaagcantctgcccatgggaaagtgctgtttggnaanncctttnatctgtgccaagtgaagaaggaaagaaatgagagtctagactcaaggnacactgaatggcaagaatgctgctgatggtggaactgctgtgaccttagnactggctccacagggtggactggctgggccctggtcccagtccctgcctggggccatgtgtcccccctattcctgtgggcttttcatacttgcctactgggccctggccccgcagccttcctatgagggatgttactgggctgtggtcctgtacccagaggtcccagggatcggctcctggcccctcgggtgacccttcccacacaccagccacagataggcctgccactggtcatgggtagctagagctgctggcttccctgtggcttagctggtggccagcctgactggcttcctgggcgagcctagtagctcctgcaggcaggggcagtttgttgcgttcttcgtggttcccaggccctgggacatctmaytcmactcctacctcccttacmaccaggagcattcaagctctggattgggcagmagatgtscccccagtcccgcaggctgtgttccagggsccctgatttcctcggatgtgctattggccccaggactgaagctgcctcccttcaccctgggactgtggttccaaggatgagagcaggggttggagccatggccttctgggaacctatggrgaaagggaatccaaggaagcagccaaggctgctcgcagcttccctgagctgcacctcttgctaaccccaccatcacactgccaccctgccctagggtctcactagta

SEQ ID NO: 2190 - DNA, 1041 bp, Homo sapiens
  misc_feature (1025)..(1025): n equals a,t,g, or c
  misc_feature (1030)..(1030): n equals a,t,g, or c
  misc_feature (1039)..(1039): n equals a,t,g, or c
ctcgtgcgcggacattgtcagctgcgtttccgcggtcgcggttgaggagctcaagcttgggaaaatggtgtgcattccttgtatcgtcattccagttctgctctggatctacaaaaaattcctggagccatatatataccctctggtttcccccttcgttagtcgtatatggcctaagaaagcaatacaagaatccaatgatacaaacaaaggcaaagtaaactttaagggtgcagacatgaatggattaccaacaaaaggaccaacagaaatctgtgataaaaagaaagactaaagaaattttcctaaaggaccccatcatttaaaaaatggacctgataatatgaagcatcttccttgtaattgtctctgacctttttatctgagaccggaattcaggataggagtctagatatttacctgatactaatcaggaaatatatgatatccgtatttaaaatgtagttagttatatttaatgacctcattcctaagttcctttttcgttaatgtagctttcatttctgttattgctgtttgaataatatgattaaatagaaggtttgtgccagtagacattatgttactaaatcagcactttaaaatctttggttctctaattcatatgaatttgctgtttgctctaatttctttgggctcttctaatttgagtggagtacaattttgttgtgaaacagtccagtgaaactgtgcagggaaatgaaggtagaattttgggaggtaataatgatgtgaaacataaagatttaataattactgtccaacacagtggagcagcttgtccacaaatatagtaattactatttattgctctaaggaagattaaaaaaagatagggaaaagggggaaacttctttgaaaaatgaaacatctgttacattaatgtctaattataaaattttaatccttactgcatttcttctgttcctacaaatgtattaaacattcagtttaactggtaaaaaaaaaaaaaaaaaaaaaaaaaaaaaaaaaaaaaaaaaaanccccnggggggggncc

SEQ ID NO: 2191 - DNA, 2542 bp, Homo sapiens
ccgggtcgacccacgcgtccggaaagatgattctcactggtggtccaggtttcagaagggtgacattccatgggacgacaaggatttcaggatgttcttcctctggactgctctgttctggggtggagtcatgttttacttgctgctcaagagatccgggagagaaatcacttggaaggactttgtcaataactatctttcaaaaggagtagtagacagattggaagtcgtcaacaagcgttttgttcgagtgacctttacaccaggaaaaactcctgttgatgggcaatacgtttggtttaatattggcagtgtggacacctttgaacggaatctggaaactttacagcaggaattgggcatagaaggagaaaatcgggtgcctgttgtctacattgctgaaagtgatggctcttttctgctgagcatgctgcctacggtgctcatcatcgccttcttgctctacaccatcagaagagggcctgctggcattggccggacaggccgagggatgggcggactcttcagtgtcggagaaaccactgccaaggtcttaaaggatgaaattgatgtgaagttcaaagatgtggctggctgtgaggaggccaagctagagatcatggaatttgtgaatttcttgaaaaacccaaagcagtatcaagacctaggagcaaaaatcccaaagggtgccattctcactggtcctccaggcactgggaagacgctgctagctaaggccacagccggagaagccaatgtccccttcatcaccgttagtggatctgagtttttggagatgttcgttggtgtgggccctgctagagtccgagacttatttgcccttgctcggaagaatgccccttgcatcctcttcatcgatgaaatcgatgcggtgggaaggaagagaggaagaggcaactttggagggcagagtgagcaggagaacacactcaaccagctgctggtggagatggatggttttaatacaacaacaaatgtcgtcattttggccggcaccaatcgaccagatatcctggaccccgcgctgcttaggccggggcgtttcgacaggcagatctttattggaccaccagacataaaaggaagagcttctattttcaaagttcatctccgaccgctaaaactggacagtaccctggagaaggataaattggcaagaaaactggcatctttaactccagggttttcaggtgctgatgttgctaatgtctgtaatgaagctgcgttgattgctgcaaggcatctgtcagattccataaatcagaaacactttgaacaggcaattgaacgagtgattggtggcttagagaagaaaacgcaggttctgcagcctgaggagaagaagactgtggcataccacgaagcaggccatgcggttgccggctggtatctggagcacgcagacccgcttttaaaggtatccatcatcccacgtggcaaaggactaggttatgctcagtatttaccaaaagaacaatacctctataccaaagagcagctcttggataggatgtgtatgactttaggtggtcgagtctctgaagaaatcttctttggaagaattacaactggtgctcaagatgacttgagaaaagtaactcagagtgcatatgcccaaattgttcagtttggcatgaatgaaaaggttgggcaaatctcctttgacctcccacgtcagggggacatggtattggagaaaccttacagtgaagccactgcaagattgatagatgatgaagtacgaatacttattaatgatgcttataaaagaacagtagctcttctcacagaaaagaaagctgacgtggagaaggttgctcttctgttgttagaaaaagaagtattagataagaatgatatggttgaacttttgggccccagaccatttgcggaaaaatctacctatgaagaatttgtggaaggcactggcagcttggatgaggacacctcacttccagaaggccttaaggactggaacaaggagcgggaaaaggagaaagaggagcccccgggtgagaaagttgccaactagaggcccagagggaggccatctcagtctctccactgtggtttcagctggtgcattatttcagctgtggctttcagaagaatgggaatgctgcgctgattttagccagccactggcccagctgaaatgatggggaaaggagtccttagtcctttcagcctcagaggtcacagtgggtggcaggtgactttccggaggccttgagggaaatgcacactgtcccatagcctcattgggctcccagacgtgctggaaaggttgagcccagagtggccgaggctggaccctgtggcaccaagtggggtcggctgaccgtgtggcagggatcgttgcactggactcttggcgtgtgggaagggatgctttctctttgtcgcccactcttcattcctgtttctcctcagttcccctgtgcagatgggctgtgaaattaaattggagtcttgataagaaaaaaaaaaaaaaaaaaaaaaaaaaaaaaaaaaaaaaaaa

SEQ ID NO: 2192 - DNA, 1056 bp, Homo sapiens
  misc_feature (7)..(7): n equals a,t,g, or c
  misc_feature (1001)..(1002): n equals a,t,g, or c
  misc_feature (1023)..(1024): n equals a,t,g, or c
  misc_feature (1053)..(1053): n equals a,t,g, or c
cttgctntacaccatcagaagagggcctgctggcattggscggacaggccgagggatgggcggactcttcagtgtcggagaaaccactgccaaggtcttaaaggatgaaattgatgtgaagttcaaagatgtggctggctgtgaggaggccaagctagagatcatggaatttgtgaatttcttgaaaaacccaaagcagtatcaagacctaggagcaaaaatcccaaagggtgccattctcactggtcctccaggcactgggaagacgctgctagctaaggccacagccggagaagccaatgtccccttcatcaccgttagtggatctgagtttttggagatgttcgttggtgtgggccctgctagagtccgagacttatttgcccttgctcggaagaatgccccttgcatcctcttcatcgatgaaatcgatgcggtgggaaggaagagaggaagaggcaactttggagggcagagtgagcaggagaacacactcaaccagctgctggtggagatggatggttttaatacaacaacaaatgtcgtcattttggccggcaccaatcgaccagatatcctggaccccgcgctrcttaggccggggcgtttcgacaggcagatctttattggaccaccagacataaaaggaagagcttctattttcaaagttcatctccgaccgctaaaactggacagtaccctggagaaggataaattggcaagaaaactggcatctttaactccagggttttcaggtgctgatgttgctaatgtctgtaatgaagctgcgttgattgctgcaaggcatctgtcagattccataaatcagaaacactttgaacaggcaattgaacgagtgattggtggcttagagaagaaaacgcaggttctgcagcctgaggagaagaagactgtggcataccacgaagcaggccatgcggttgcccggctggtatctggacacgcagacccgttttaaaggtatccatcatccacgtggnnaaaggactaggttatgcttannatttaccaaaagaaccaataccttctatnccc

SEQ ID NO: 2193 - DNA, 79 bp, Homo sapiens
ttttttttttgtgccaccacgccggactggttttattttttgtagagatggggcctcacaatgctgatctgactgactc

SEQ ID NO: 2194 - DNA, 707 bp, Homo sapiens
  misc_feature (552)..(552): n equals a,t,g, or c
  misc_feature (577)..(577): n equals a,t,g, or c
  misc_feature (587)..(587): n equals a,t,g, or c
  misc_feature (664)..(664): n equals a,t,g, or c
  misc_feature (667)..(667): n equals a,t,g, or c
agggctcatccctctgcagagcgcggggtcaccggaaggagacgccatgacgcccgccctcacagccctgctctgccttgggctgagtctgggccccaggacccgcgtgcaggcagggcccttccccaaacccaccctctgggctgagccaggctctgtgatcagctgggggagccccgtgaccatctggtgtcaggggagcctggaggcccaggagtaccaactggataaagagggaagcccagagcccttggacagaaataacccactggaacccaagaacaaggccagattctccatcccatccatgacacagcaccatgcagggagataccgctgccactattacagctctgcaggctggtcagagcccagcgaccccctggagctggtgatgacaggagcctatagcaaacccaccctctcagccctgcccagccctgtggtggcctcaggggggaatatgacccttcgatgtggctcacagaagagatatcaccattttggtctgatgaaggaaggagaacaccagcttccccggaccctggactnacagcagcttcacagtgggggggtncaggccctgntcctgtgggccccgtgaaccccagccacaggtggagggtcacatgctattactattatatgaacacccccccggtgnggncccaacccaatgaccccctggagaatctggcccttaaggc

SEQ ID NO: 2195 - DNA, 713 bp, Homo sapiens
  misc_feature (684)..(684): n equals a,t,g, or c
  misc_feature (691)..(691): n equals a,t,g, or c
ttccccatccgccagggctgcctataaagaggagagctggtttcagacttcagaaggacacgggcagcagacagtggtcagtcctttcttggctctgctgacactcgagcccacattccgtcacctgctcagaatcatgcaggtctccactgctgcccttgctgtcctcctctgcaccatggctctctgcaaccagttctctgcatcacttgctgctgacacgccgaccgcctgctgcttcagctacacctcccggcagattccacagaatttcatagctgactactttgagacgagcagccagtgctccaagcccggtgtcatcttcctaaccaagcgaagccggcaggtctgtgctgaccccagtgaggagtgggtccagaaatatgtcagcgacctggagctgagtgcctgaggggtccagaagcttcgaggcccagcgacctcggtgggcccagtggggaggagcaggagcctgagccttgggaacatgcgtgtgacctcyacagctacctcttctatggactggktgttgccaaacagscacactgtgggactcttcttaacttaaattttaatttatttatactatttarkttttrkaatttattttygawttcacagygkgtttgkgaattgkttgctctgaragttcccctgkccccttcmctttcctcacagtgnggctggnggacaaccgaatgctgcatcgg

SEQ ID NO: 2196 - DNA, 824 bp, Homo sapiens
cgcggccgagcggaggcggagtcggcgccgagaacatggctggaggcaaagctggaaaggacagtgggaaggccaaggctaaggcagtatctcgctcacagagagctgggctacaggtgctggagctggcaggtaatgcttctaaggatctcaaagtaaagcgtatcactccgcgtcacttgcagcttgcaatccgtggtgatgaagagttggattctcttatcaaggctaccatagctgggggtggtgtgatccctcacatccacaaatctctgattggaaagaagggacagcagaaaactgcttagagggatgctttaaccaaccctcttcctccccgtcattgtactgtaactgggacagaagaaataatggggatatgtggaatttttaacaacagttaaatggaaaagcatagacaattactgtagacatgataaaagaaacatttgtatgttcttagactcgaagtttgataaaagtaccttttcatgtggtgacagttgtgtgttgattggctaggtttctcccgtgtgttttatacaaaaatggaattgataaaccattttttacaaaattaatttgtctcaaaactgttctgttcatgatgtattagaaatattttactcagactttaaatattttaaatctcagattggttattcagagtaaccttagaacagaaattgggaatatatctttacaatgattgataccatggtatattgactcttagatgctattgatctgtagcaccattttttacaaacgactaaggaaaaaacctgccaattaaatcatgatatgccatcaattatggaatt

SEQ ID NO: 2197 - DNA, 965 bp, Homo sapiens; identical to SEQ ID NO: 223
  misc_feature (1)..(1): n equals a,t,g, or c
  misc_feature (5)..(5): n equals a,t,g, or c
  misc_feature (22)..(22): n equals a,t,g, or c
  misc_feature (75)..(76): n equals a,t,g, or c

SEQ ID NO: 2198 - DNA, 1485 bp, Homo sapiens
  misc_feature (1380)..(1380): n equals a,t,g, or c
  misc_feature (1407)..(1407): n equals a,t,g, or c
  misc_feature (1420)..(1420): n equals a,t,g, or c
  misc_feature (1435)..(1435): n equals a,t,g, or c
  misc_feature (1439)..(1439): n equals a,t,g, or c
ctgcaggaattcggcacgagcctgacagccggacctgggactgggctggggccctggcggatggagacatgctgcccctgctgctgctgcccctgctgtggggggggtccctgcaggagaagccagtgtacgagctgcaagtgcagaagtcggtgacggtgcaggagggcctgtgcgtccttgtgccctgctccttctcttacccctggagatcctggtattcctctcccccactctacgtctactggttccgggacggggagatcccatactacgctgaggttgtggccacaaacaacccagacagaagagtgaagccagagacccagggccgattccgcctccttggggatgtccagaagaagaactgctccctgagcatcggagatgccagaatggaggacacgggaagctatttcttccgcgtggagagaggaagggatgtaaaatatagctaccaacagaataagctgaacttggaggtgacagccctgatagagaaacccgacatccactttctggagcctctggagtccggccgccccacaaggctgagctgcagccttccaggatcctgtgaagcgggaccacctctcacattctcctggacggggaatgccctcagccccctggaccccgagaccacccgctcctcggagctcaccctcacccccaggcccgaggaccatggcaccaacctcacctgtcaggtgaaacgccaaggagctcaggtgaccacggagagaactgtccagctcaatgtctcctatgctccacagaacctcgccatcagcatcttcttcagaaatggcacaggcacagccctgcggatcctgagcaatggcatgtcggtgcccatccaggagggccagtccctgttcctcgcctgcacagttgacagcaacccccctgcctcactgagctggttccgggagggaaaagccctcaatccttcccagacctcaatgtctgggaccctggagctgcctaacataggagctagagagggaggggaattcacctgccgggttcagcatccgctgggctcccagcacctgtccttcatcctttctgtgcagagaagctcctcttcctgcatatgtgtaactgagaaacagcagggctcctggcccctygtcctcaccctgatmaggggggctctcatgggggctggcttcctcctcacctatggcctcacctggatctactataccaggtgtggaggcccccagcagagcagggctgagaggcctggctgagccccttccgctcaagacagaactgaggtgtggacacttagccctgtgggacacatgcaggacatcactgtcagcttctttctggaagctcacattccactgactacccctcttttccttnctggcccatacccccttctacttattnccctctgctttgngagtcttggccccancatnttccaagcccttgtgaaagggaatggacctttcgggcttatacccc

SEQ ID NO: 2199 - DNA, 2027 bp, Homo sapiens
ggcacgagctgggctggggccctggcggatggagacatgctgcccctgctgctgctgcccctgctgtggggggggtccctgcaggagaagccagtgtacgagctgcaagtgcagaagtcggtgacggtgcaggagggcctgtgcgtccttgtgccctgctccttctcttacccctggagatcctggtattcctctcccccactctacgtctactggttccgggacggggagatcccatactacgctgaggttgtggccacaaacaacccagacagaagagtgaagccagagacccagggccgattccgcctccttggggatgtccagaagaagaactgctccctgagcatcggagatgccagaatggaggacacgggaagctatttcttccgcgtggagagaggaagggatgtaaaatatagctaccaacagaataagctgaacttggaggtgacagccctgatagagaaacccgacatccactttctggagcctctggagtccggccgccccacaaggctgagctgcagccttccaggatcctgtgaagcgggaccacctctcacattctcctggacggggaatgccctcagccccctggaccccgagaccacccgctcctcagagctcaccctcacccccaggcccgaggaccatggcaccaacctcacctgtcagatgaaacgccaaggagctcaggtgaccacggagagaactgtccagctcaatgtctcctatgctccacagaccatcaccatcttcaggaacggcatagccctagagatcctgcaaaacacctcataccttccggtcctggagggccaggctctgcggctgctctgtgatgctcccagcaacccccctgcacacctgagctggttccagggctcccctgccctgaacgccacccccatctccaataccgggatcttggagcttcgtcgagtaaggtctgcagaaaaaggaggcttcacctgccgcgctcagcacccgctgggcttcctgcaaatttttctgaatctctcagtttactccctcccacagttgctgggcccctcctgctcctgggaggctgagggtctgcactgcagatgctcctttcgagcctggccggccccctccctgtgctggcggcttgaggagaagccgctggaggggaacagcagccagggctcattcaaggtcaactccagctcacctggtccctgggccaacagctccctgatcctccacggggggctcaattccgacctcaaagtcagctgcaaggcctggaacatctatgggtcccagagcggctctgtcctgctgctgcaagggagatcgaacctcgggacaggagtggttcctgcagcccttggtggtgctggtgtcatggccctgctctgtatctgtctgtgcctcatcttctttttaatagtgaaagcccgcaggaagcaagcagctgggagaccagagaaaatggatgatgaagaccccattatgggtaccatcacctcgggttccaggaagaagccctggccagacagccccggagatcaagcatctcctcctggggatgcccctcccttggaagaacaaaaggagctccattatgcctcccttagtttttctgagatgaagtcgagggagcctaaggaccaggaggccccaagcaccacggagtactcggagatcaagacaagcaagtgaggatttgcccagagttcagtcctggctggaggagccacagcctgtctgggggaaaggacaagtcagggaccacttgctgaagcacgaagagcccttgtggcaatgttaacattaactgatgtttaagtgctccaagcagagcagaaagaaaacagatgatggaattagagaggtgggctcaaatctaggccctggcactgtcatcaagcaattcactgcatccctctgtgcctcagtttcccattctgtaaatcagagatcatgcatgctacctcaaaggttgttgtgaacattaaagaaatcaacacatggaaatcaaaaaaaaaaaaaaaaaa

SEQ ID NO: 2200 - DNA, 1451 bp, Homo sapiens
  misc_feature (1450)..(1450): n equals a,t,g, or c
tgggcgacccacgcgtcggcaagatggctgtggagctgggcgtgctgctcgtccggccccggcccggaaccgggctgggtagagtgatgcggaccctcctgctggtgctgtggctggcgacgcgcggaagcgcgctctactttcacatcggagagacggagaagaagtgctttattgaggagatcccggacgagaccatggtcataggaaactaccggacgcagctgtatgacaagcagcgggaggagtaccagccggccaccccggggcttggcatgtttgtggaggtgaaggacccagaggacaaggtcatcctggcccggcagtatggctccgagggcaggttcactttcacttcccatacccctggtgagcaccagatctgtcttcactccaattccaccaagttctccctctttgctggaggcatgctgagagttcacctggacatccaggtaggtgaacatgccaatgactatgcagaaattgctgctaaagacaagttgagtgagttgcagctacgagtgcgacagctggtggaacaagtggagcagatccagaaagagcagaactaccagcggtggcgagaggagcgcttccggcagaccagtgagagcaccaaccagcgggtgctgtggtggtccattctgcagaccctcatcctcgtggccatcggtgtctggcagatgcggcacctcaagagcttctttgaagccaagaagcttgtgtagctgtcccaggcgtcacaacccatcctcccaggctgggggagaaaggacctcctggaactgacttcttctgtcaggaggactggtttccagccatacctgttctggaagggagaggggctggaggcacccacaggcacaagctgaaggcagcagcttggctaatactgagcaggtagtggggcaaattcctgccctctctctctggcctctgggccgtttggtagtaatcacccaggggctggtaaagcccctcctcttggcacctcagaatcacagtgttactgatcagggatgtgaggctgctgttgggggtggggggaggggaatgggcaggcaagccagtcttctgtcttcctttgctaacttagggttttgagcaggttggggtatggtgcctgtcatacccacctgccaccctgggaacctcactgttctctctttcagcctagacctgctgatccagggtgtgtgtgagttgagggtgggtggaggggtttgcagtgtgggaatgtggccctgcagttgacctgagctgcttcacatggttgtccattctggggcttaaagaactgggaccagaccaagtagaggccttggtgctggttggggtggggcctgcagagtcttagttactgatttcattttcaataaatgtaggtttgttacatgagtttcccaatwaaaaaaaaaatgamaaaaaaaaaaaaaaaaaaaggggng

SEQ ID NO: 2201 - DNA, 965 bp, Homo sapiens; identical to SEQ ID NO: 223
  misc_feature (1)..(1): n equals a,t,g, or c
  misc_feature (5)..(5): n equals a,t,g, or c
  misc_feature (22)..(22): n equals a,t,g, or c
  misc_feature (75)..(76): n equals a,t,g, or c

SEQ ID NO: 2202 - DNA, 1056 bp, Homo sapiens
aggcggggtttcgccgtgttggccaggatggtctcgatctcctgaccttgtgatctgcctgcctcggcctcccagggtgctgggattgcaggcatgagccactgcgcccggctgacacagagctgaagttctatccttcatgtcgcattgtatctggagacagcgtctgcataggtcactakcagtgaagcgaagtttgatcacttggtggaggcagtgactgctggatctttccactgtaaaggcacacgtttcccttcgccaatgaccttcgggtaacacacccgggcacagtgtgaatatcctgcgcaatgccttactcagatatggacaataaaggatgacaggaaacggagaaaaagctttcaacatgaaagagtgagacagaaacaaacaggaaaaagctttcaacatgaaagagggagacagaaacaaacaggaaaaagccgactcagaggaaagagagaccatcgcaggaagcaaaagaaaacttcccctaaacaataaatagccttaaaagtgagaatatatattacattcataattgacaagattgctatgaaaaaaatatttatttatttattttgagacaaggtcttgctctgtcacccaggggagtgcagtggcatgatcatggctcactgcagcctcaagtgcctgggctcaggcaatcctcctgcctcggcctcccaagtagctggaactgcaggtgtgcatcaccacacccagctaattaaaaaacaatttttttgtagagatgggctctcgctgtgttgcccaggttggtcttgaattcctggcctcaagtgattctcccacctcggtctctcagagtgctggaattgcgggtatgagccactgcacctggccaaaaaaaaatttcaaaaacaagatagtgctcttgggctccacactgaaaaatccactgcaaaattggaaggtaaagtacaaacaaaaatttcttataaagtagaacaaaaaaaaggaattcgatatcaagcttatcgataccgtcgacctcgagggggggcccgtacccaatcgcctgtgatgatg

SEQ ID NO: 2203 - DNA, 413 bp, Homo sapiens
accatttgaaaatgagctgcagccataatattttcccatacatatttcagtatctatcttcacagaataaggacattatcacacataactaaatccatgacacacccaagaaaatttaacacaattttctaatgttgtctcatgttgaatccgtattctagcctcctgcattggccctagaatgtcttttccatgtgcacacattgcatttggctcttatgtctctttattctccttactagaatattcccaacctcttgttttccccacaatgctgactttttgagtaggccaggccatttagtggaaggagcatctcatatctgatttgtctgattgtttccttgtaccgtcatttaacttgtacctctatctcttgtaaatcccataaactggaagtgagatctaaagtc

SEQ ID NO: 2204 - DNA, 213 bp, Homo sapiens
tttgccattcgccattcaggtgcgcarctgttggaaagggcgatcgggtgcgggcctcttcgctattacgccagctggcgaaagggggatgtgctgcaaggcgattaagttgggtaacgccagggttttcccagtcacgacgttgtaaaacgacggccagtgaattgtaatacgactcactatagggcgaattgggtaccgggccccccctcg

SEQ ID NO: 2205 - DNA, 1319 bp, Homo sapiens
  misc_feature (49)..(49): n equals a,t,g, or c
aaatagtcaaagagagtgggagagcgaatgagtcagggaaacgcagtgngacttttgggtggcactgagacacctgggctgagacatacaggacagagcatggctcgcctacagactgcactcctggttgtcctcgtcctccttgctgtggcgcttcaagcaactgaggcaggcccctacggcgccaacatggaagacagcgtctgctgccgtgattacgtccgttaccgtctgcccctgcgcgtggtgaaacacttctactggacctcagactcctgcccgaggcctggcgtggtgttgctaaccttcagggataaggagatctgtgccgatcccagagtgccctgggtgaagatgattctcaataagctgagccaatgaagagcctactctgatgaccgtggccttggctcctccaggaaggctcaggagccctacctccctgccattatagctgctccccgccagaagcctgtgccaactctctgcattccctgatctccatccctgtggctgtcacccttggtcacctccgtgctgtcactgccatctcccccctgacccctctaacccatcctctgcctccctccctgcagtcagagggtcctgttcccatcagcgattcccctgcttaaacccttccatgactccccactgccctaagctgaggtcagtctcccaagcctggcatgtggccctctggatctgggttccatctctgtctccagcctgcccacttcccttcatgaatgttgggttctagctccctgttctccaaacccatactacacatcccacttctgggtctttgcctgggatgttgctgacactcagaaagtcccaccacctgcacatgtgtagccccaccagccctccaaggcattgctcgcccaagcagctggtaattccatttcatgtattagatgtcccctggccctctgtcccctcttaataaccctagtcacagtctccgcagattcttgggatttgggggttttctcccccacctctccactagttggaccaaggtttctagctaagttactctagtctccaagcctctagcatagagcactgcagacaggccctggctcagaatcagagcccagaaagtggctgcagacaaaatcaataaaactaatgtccctcccctctccctgccaaaaggcagttacatatcaatacagagactcaaggtcactagaaatgggccagctgggtcaatgtgaagccccaaatttgcccagattcacctttcttcccccactccctttttttttttttttttgagawggagttygctcttggacccacctgga

SEQ ID NO: 2206 - DNA, 403 bp, Homo sapiens
  misc_feature (10)..(11): n equals a,t,g, or c
  misc_feature (29)..(29): n equals a,t,g, or c
tggcttcctnntcctcttgagaaatattnttttcatacagcaagtatgggacagcagtgtcccaggtaaggacataaatgttacaagtgtctggtcctttctgagggaggctggtgccgctctgcagggtatttgaacctgtggaattggaggaggccatttcactccctgaacccagcctgacaaatcacagtgagaatgttcaccttataggcttgctgtggggctcaggttgaaagtgtggggagtgacactgcctaggcatccagctcagtgtcatccagggcctgtgtccctcccgaacccagggtcaacctgcctgccacaggcactagaaggacgaatctgcctactgcccatgaacggggccctcaagcgtcctgggatctccttctccctcctg

SEQ ID NO: 2207 - DNA, 589 bp, Homo sapiens
  misc_feature (548)..(548): n equals a,t,g, or c
  misc_feature (575)..(575): n equals a,t,g, or c
ccaaatgctgagattacaggcgtgagctatcacacccagcctccccctttttttcctaataggagactcctgtacctttcttcgttttacctatgtgtcgtgtctgcttacatttccttctcccctcaggctttttttgggtggtcctccaacctccaatacccaggcctggcctcttcagagtaccccccattccactttccctgcctccttccttaaatagctgacaatcaaattcatgctatggtgtgaaagactacctttgacttggtattataagctggagttatatatgtatttgaaaacagagtaaatacttaagaggccaaatagatgaatggaagaattttaggaactgtgagagggggacaaggtgaagctttcctggccctgggaggaagctggctgtggtagcgtagcgctctctctctctgtctgtggcaggaggcaaagagtagggtgtaattgagtgaaggaatcctgggtagagaccattctcaggtggttgggccaggctaaagactgggattgggtcwatctatgccttnctggctgatttttggaaaaaaccgggnttttgccatggtta

SEQ ID NO: 2208 - DNA, 419 bp, Homo sapiens
cccatttttgtttaaaaatgtacttattcccatgcatacaaaagaaatcttccaaaagcaaatgtgcccataacaattgttactggtaagattactgaggacttttaaaaaaaatttccttatttgcaaactttacagtaaactttttttttttacatattagaactcaatgaagaattatttaaaagagaggaaaggcagtgcagggctggaggtcctggagggtggcggcgggtcgtcctaactagcaggctgaaaggtgctggaggggatgccttcactcagaggaagttcacagccacctgccttggaacatgtacctgttcatcttttcgtaatgttagtattcattttgctatcttcctgttgccatttccaaacagtgtcagggaattcgataatcaagcttaatcgaaaaa

SEQ ID NO: 2209 - DNA, 377 bp, Homo sapiens
  misc_feature (377)..(377): n equals a,t,g, or c
gaattcctttttttttttacatattagaactcaatgaagaattatttaaaagagaggaaaggcagtgcagggctggaggtcctggagggtggcggcgggtcgtcctaactagcaggctgaaaggtgctggaggggatgccttcactcagaggaagttcacagccacctgccttggaacatgtacctgttcatcttttcgtaatgttagtattcattttgctatcttcctgttgccatttccaaacagtgtcagggaattcgatatcaagcttatccgataccgtcgacctccgaagggggggcccggtacccaattcgccctataagtgrakccgwattaccattcactggccgtcgtttttaaaacgtccgtgacn

SEQ ID NO: 2210 - DNA, 1345 bp, Homo sapiens
  misc_feature (6)..(6): n equals a,t,g, or c
aggagncccccttttttttttttttacatattagaactcaatgaagaattatttaaaagagaggaaaggcagtgcagggctggaggtcctggagggtggcggcgggtcgtcctaactagcaggctgaaaggtgctggaggggatgccttcactcagaggaagttcacagccacctgccttggaacatgtacctgttcatcttttcgtaatgttagtattcattttgctatcttcctgttgccatttccaaacagtgtcagtatgtttttgttaaatacgaacatttaaaacatatcgtatctgtaagcctatttgggtgtcttcatttcatgcccgcactgcaccataatgagtaccacacaaagccagaggatgacacttcctccagaggtctcactgcacatggagaggttagccctggcattaagggtccttggaatctctcagcagtcatagtcagtcagatgcaccaagggcagctgagtcaatctcctttttgtaacaacaggccgtttctgcggttctcagtgctgccaacctgggcatactgaagagcctcaaccaatactggctctcagggtactttcctttttaaaagaagttcaacttttgctattcttatgccccataacttttaatttgcacaagatcagccatgcccactcactgaattctattatattacccacacctctggaaattcacaaagtctgaattcagatctatgcataaggatgcaaacggattagcaataattgctggcactgccatcaacacctcctgtcgatctcacctgatctgaggataaatgaaggcaaagaatgtggccccagcccctggattggagtggaggcaaggagggtggcgagctgtcttcagcagtcggcctcacctctctgctcctgtatcaacaagtgccatttcatccccacttccaatccccaacatttataccccgtgaatcaattcttcttcagcatgccagttgctggagacagcaccatttacatacaggcatctatagcagttatcttccagggtggaagcaagagttttgtaatcataaaaaacaggatgagaaacaaggagttctgaaaagaagagaaggcggttatagaggtgctggggtaaaaagcaaagcaaaggggtaagataggaaaggaggcctggattgtttctggggcatccagggaaaggagttgcaagcagaaagaggaccctggattctgcacacagcagtgccccatcttggagatgccatgagcacagacagaaggtttactaggtgggcggcacagtgacttctccccagcactccacccgtttgtccggacgcgtgggtcga

SEQ ID NO: 2211 - DNA, 1614 bp, Homo sapiens
ttttttttttttacatattagaactcaatgaagaattatttaaaagagaggaaaggcagtgcagggctggaggtcctggagggtggcggcgggtcgtcctaactagcaggctgaaaggtgctggaggggatgccttcactcagaggaagttcacagccacctgccttggaacatgtacctgttcatcttttcgtaatgttagtattcattttgctatcttcctgttgccatttccaaacagtgtcagtatgtttttgttaaatacgaacatttaaaacatatcgtatctgtaagcctatttgggtgtcttcatttcatgcccgcactgcaccataatgagtaccacacaaagccagaggatgacacttcctccagaggtctcactgcacatggagaggttagccctggcattaagggtccttggaatctctcagcagtcatagtcagtcagatgcaccaagggcagctgagtcaatctcctttttgtaacaacaggccgtttctgcggttctcagtgctgccaacctgggcatactgaagagcctcaaccaatactggctctcagggtactttcctttttaaaagaagttcaacttttgctattcttatgccccataacttttaatttgcacaagatcagccatgcccactcactgaattctattatattacccacacctctggaaattcacaaagtctgaattcagatctatgcataaggatgcaaacggattagcaataattgctggcactgccatcaacacctcctgtcgatctcacctgatctgaggataaatgaaggcaaagaatgtggccccagcccctggattggagtggaggcaaggagggtggcgagctgtcttcagcagtcggcctcacctctctgctcctgtatcaacaagtgccatttcatccccacttccaatccccaacatttataccccgtgaatcaattcttcttcagcatgccagttgctggagacagcaccatttacatacaggcatctatagcagttatcttccagggtggaagcaagagttttgtaatcataaaaaacaggatgagaaacaaggagttctgaaaagaagagaaggcggttatagaggtgctggggtaaaaagcaaagcaaaggggtaagataggaaaggaggcctggattgtttctggggcatccagggaaaggagttgcaagcagaaagaggaccctggattctgcacacagcagtgccccatcttggagatgccatgagcacagacagaaggtttactaggtgggcggcacagtgacttctccccagcactccacccgtttgtcagtagtgtacacgtggaggggtcaccaagatataacggcacaggcaaataagacacagttgcaaggacggcaaccagccctgcagctcatgggaaggaaagaatccttcaggtcatgatcccccaccatttgtgttggtccccctggctagtcccagttcagcccttatctccccttctcaggcaaacaggcccaggtgagtagaacaagcctcccttgctgctccctttgaaacaagcaccttccttctcagcacagaggctggcagtggcttccattctacgcccaaagtttgtcg

SEQ ID NO: 2212 - DNA, 2562 bp, Homo sapiens; identical to SEQ ID NO: 1403

SEQ ID NO: 2213 - DNA, 2107 bp, Homo sapiens
  misc_feature (2094)..(2094): n equals a,t,g, or c
gcccgactctaggccggaagcgcgcggagaccatgtagtgagaccctcgcgaggtctgagagtcactggagctaccagaagcatcatggggccctggggagagccagagctcctggtgtggcgccccgaggcggtagcttcagagcctccagtgcctgtggggctggaggtgaagttgggggccctggtgctgctgctggtgctcaccctcctctgcagcctggtgcccatctgtgtgctgcgccggccaggagctaaccatgaaggctcagcttcccgccagaaagccctgagcctagtaagctgtttcgcggggggcgtctttttggccacttgtctcctggacctgctgcctgactacctggctgccatagatgaggccctggcagccttgcacgtgacgctccagttcccactgcaagagttcatcctggccatgggcttcttcctggtcctggtgatggagcagatcacactggcttacaaggagcagtcagggccgtcacctctggaggaaacaagggctctgctgggaacagtgaatggtgggccgcagcattggcatgatgggccaggggtcccacaggcgagtggagccccagcaaccccctcagccttgcgtgcctgtgtactggtgttctccctggccctccactccgtgttcgaggggctggcggtagggctgcagcgagaccgggctcgggccatggagctgtgcctggctttgctgctccacaagggcatcctggctgtcagcctgtccctgcggctgttgcagagccaccttagggcacaggtggtggctggctgtgggatcctcttctcatgcatgacacctctaggcatcgggctgggtgcagctctggcagagtcggcaggacctctgcaccagctggcccagtctgtgctagagggcatggcagctggcacctttctctatatcacctttctggaaatcctgccccaggagctggccagttctgagcaaaggatcctcaaggtcattctgctcctagcaggctttgccctgctcactggcctgctcttcatccaaatctagggggcttcaagagaggggcaggggagattgatgatcaggtgcccctgttctcccttccctcccccagttgtggggaataggaaggaaaggggaagggaaatactgaggaccaaaaagttctctgggagctaaagatagagcctttggggctatctgactaatgagagggaagtgggcagacaagaggctggccccagtcccaaggaacaagagatggtcaagtcgctagagacatatcaggggacattaggattggggaagacacttgactgctagaatcagaggttggacactatacataaggacaggctcacatgggaggctggaggtgggtacccagctgctgtggaacgggtatggacaggtcataaacctagagtcagtgtcctgttggtcctagcccatttcagcaccctgccacttggagtggacccctcctactcttcttagcgcctaccctcatacctatctccctcctcccatctcctaggggactggcgccaaatggtctctccctgccaattttggtatcttctctggcctctccagtcctgcttactcctctatttttaaagtgccaaacaaatccccttcctctttctcaaagcacagtaatgtggcactgagccctacccagcacctcagtgaagggggcctgcttgctctttattttggtcccggatcctggggtggggcagaaatattttctgggctggggtaggaggaaggttgttgcagccatctactgctgctgtaccctaggaatatggggacatggacatggtgtcccatgcccagatgataaacactgagctgccaaaacatttttttaaatacacccgaggagcccaagggggaagggcaatgcctacccccagcgttatttttggggagggagggctgtgcatagggacatattctttagaatctattttattaactgacctgttttgggacctgttacccaaataaaagatgtttctagamaaaaaaaaaaaaaaaastcgagggggggcccgtacccaatcgcctgngatgcatcgtata

SEQ ID NO: 2214 - DNA, 291 bp, Homo sapiens
  misc_feature (277)..(277): n equals a,t,g, or c
tttacccatagaggaaatccttcaaaaaccttcattagaaaactgccacagtaagaagtcctgcttcttaaagcagctgcttattcagctgttaagttctactcctatggaagctattttactgaacctaaatctgtttctgtatttgtttccttcatatgacggtcaatacatcttcccttctagcattaaatgtcctcccagatctctcattcttccctcttctgctctcatttgtactgttagacttcctccctcttttttttttttttttttnaaaaaaaaggggga

SEQ ID NO: 2215 - DNA, 738 bp, Homo sapiens
  misc_feature (126)..(126): n equals a,t,g, or c
  misc_feature (136)..(136): n equals a,t,g, or c
  misc_feature (145)..(145): n equals a,t,g, or c
  misc_feature (724)..(724): n equals a,t,g, or c
tcatgcctattgttaagacttcctccctcttcttttttttttttttttttaaagagatggggatctcactawgttggccggggtggtytggaaytccagggctcaatcagtccttccacctaagcntccaaagtgntggaatwantagtgtgagccaccgtgtccgggcccctcatttttgttcctamtcttgaytcttcatcacagtgtctttcctwacatcttccttcagtgcyttcacaatgtaaatagaaatgaaacccacaaataatagcaagacaayttttctttaytcctgttctctgtgcttttatcaaaaatgtaatattttaaacaaatccatggctatttctgtgcagctgtgaccagtagggaaaactccagctgctgatgactgtgctttgtcatatatttggagtaatcccattattattaaaataatttgaaaattatttttgccccaagacacaaaagctgaaatactcttttcacaaagtattattggtaggttagtagtgatttataaatatataattaggatttatttttctcagtgtttcttcattgcttggcccctttctaaccttcattgactgaaagcagatgtttatatcaccatctctgattttgcagaattgatctgtccttacactgcatttagcattgattgtgtatggaacataaagtgcttttctgatgcatatgattcggtagctctttgaantggccccccccccc

SEQ ID NO: 2216 - DNA, 1778 bp, Homo sapiens
  misc_feature (1612)..(1612): n equals a,t,g, or c
  misc_feature (1735)..(1735): n equals a,t,g, or c
cctttttttttttttttattttttttttcagtcctctcttatgaacatggagttagcttttattaaacacaaatgtaccagacactgtgccaggcacttcacatacagtatttcatttagtgcaacaatcctgcagtactggtcttaacctaatgttgcaaatggggaatctgagattcaacaaggttaattagcttgcccgtaatcataagcacataaatgtgattctcaaggattccaaggcccttgctcagtttactggccatgctgttttcttgcattttatgtaggaagaacaggacccaggcatctccctccaccattgacctccagagaagagatgacacagttggaagggctgtctaagacagacaggaaatggagttgggggccaaatctaagttaggggatctgagttaggggagcacttctcaggagtgaaaatgcacaggaaagtggtggctggagttggaagtgttagaggcctgagatctacggtcttgcgcctgctacagcacctgcaaggttctactgagcagacaggtatttcattcagctattaggccttaggcttctgggggggaaatgaaagggtgggtggtggagcctcaggggttaatgtccaagattgtgtctgtgggtgagcagtcagtattcaaacgtggtttctgtggctgagagagtggtatccaaggttatgcccgtacctgagggagtggtattcccacctgatggggtagtgtctatagtccggggacgacagtgcatccagttgtgggaaatatttctgggatagcctttctctactcgaagctgctggttgaggcgccagtagactttgcccttgaagaagtagactcggccatcttgccaactcatagcagccgagggctggtttggcactcccgtaaacaaacccttgattggtttggggtagctgctgaagtcagttcgggctagctcgtcccactgccagtacccggagcccttaaagaggaacaccttttggttgagaggccaatagagagctgcatccaggttaggttctaccctattcagcttcttggggaagccaggagacatcttgaaattaatgtagcgccacaccttgtctcccttaaagaagtgaatccattgtgttcgaggcgagtagacagcagcatccaggtttccggggagcccctcccaaagggcagacactcggaacaaggggcccggtcctgaatctgatacagtccacacatagtcccccttgaaagcataggtcttcccacggggccccagcatcatggcatccagttcactactgcaagggtctggcatgggactgggttctgtgggcactgggggcacagtgggcagctctgtctcttcttcttcctcatcccttatcactggactcttcttgccatagagagcctggatccctgccacatcatctgrgtgcagcttaaagtggggccggtagccctcgtagactgggccatgagggcctgggaatatcgggagtgcccaagccccagagcatggcccacttcatgggctgcaatgatgcgcaggttcaccccacggtaggtcccctcagtccagaactcgtcttcgtcgaagtgcncactgcccagctctgggatgtcggcatgggccaggactctcccaggcccatcaaaagtattggaacagtacgagctttggcggccatggaaggagaggcggatgtcagccgcaccagcctgcncctcttggaaggtcaagggagccacattgctccagtcctggaa

SEQ ID NO: 2217 - DNA, 1450 bp, Homo sapiens
  misc_feature (35)..(35): n equals a,t,g, or c
  misc_feature (60)..(60): n equals a,t,g, or c
  misc_feature (82)..(82): n equals a,t,g, or c
  misc_feature (1293)..(1293): n equals a,t,g, or c
  misc_feature (1296)..(1296): n equals a,t,g, or c
  misc_feature (1303)..(1303): n equals a,t,g, or c
  misc_feature (1331)..(1331): n equals a,t,g, or c
  misc_feature (1439)..(1439): n equals a,t,g, or c
  misc_feature (1441)..(1441): n equals a,t,g, or c
tgatgcggtttggccagtacatcaatggcgtgaanacggtttgactcacgggatttccangtctccaccccattgacgtcantggaagttggtttggccccaaaatcaacgggactttccaaaatgtcgtaacaactccgccccattgacgcaaatgggcggtaggcgtgtacggtgggaggtctatataagcagagctcgtttagtgaaccgtcagatcgcctggagacgccatccacgctgttttgacctccatagaagacaccgggaccgatccagcctccggactctagcctaggccgcgggacggataacaatttcacacaggaaacagctatgaccactaggcttttgcaaaaagctatttaggtgacactatagaaggtacgcctgcaggtaccggtccggaattcccgggtcgacccacgcgtccggacctgcacacagggcaggggcactcggcagttcccagaggccacccctcccaccccagacatccagacatctggaactttgggtgccaagagtccagcttaatgcaggcagcctggcttttgggggctttggtggtcccccagctcttgggctttggccatggggctcggggagcagagagggagtgggagggaggctggggaggtgcccaggaggaggagcgggagagggaggccctgatgctgaagcatctgcaggaagccctaggactgcctgctgggaggggggatgagaatcctgccggaactgttgagggaaaagaggactgggagatggaggaggaccagggggaggaagaggaggaggaagcaacgccaaccccatcctccggccccagcccctctcccacccctgaggacatcgtcacttacatcctgggccgcctggccggcctggacgcaggcctgcaccagctgcacgtccgtctgcacgcgttggacacccgcgtggtcgagctgacccaggggctgcggcagctgcggaacgcggcaggcgacacccgcgatgccgtgcaagccctgcaggaggcgcagggtcgcgccgagcgcgagcacggccgcttggagggctgcctgaaggggctgcgcctgggccacaagtgcttcctgctctcgcgcgacttcgaagctcaggcggcggcgcaggcgcggtgcacggcgcggggcgggagcctggcgcagccggcagaccgccagcagatggaggcgctcactcggtacctgcgcgcggcgctcgctccctacaactggcccgtgtggctgggcgtgcacgatcggcgcgccgaggggcctttacctnttngaaaacnggcaagcggcggggcccttttttggctnggaattggtttaacccggccccgaagttcggggcccagcccaagggccttggccgaatccggttaaccccggaccagcccaacggggggcacgcttcgaaaaactggntnggcgcaagg

SEQ ID NO: 2218 - DNA, 273 bp, Homo sapiens
  misc_feature (9)..(9): n equals a,t,g, or c
  misc_feature (249)..(249): n equals a,t,g, or c
tgaggatcntcctccccctggtcctcctccatctcccagtcctcttttccctcaacagttccggcaggattctcatcccccctcccagcaggcagtcctagggcttcctgcagatgctggggcaggggaggggtggtgagccccagcctgccaccaagatgccccattcacccctttccaactcataactcattctctgctgcctgagtcctgtctctgagcccatcaccctcccactcctctgagacnatcccaatcgctcatcattgtccg

SEQ ID NO: 2219 - DNA, 1382 bp, Homo sapiens
  misc_feature (34)..(34): n equals a,t,g, or c
ccacgcgtccgttaagagagaagctgggagaatngggaaccccacgcgtccggacctgcacacagggcaggggcactcggcagttcccagaggccacccctcccaccccagacatccagacatctggaactttgggtgccaagagtccagcttaatgcaggcagcctggcttttgggggctttggtggtcccccagctcttgggctttggccatggggctcggggagcagagagggagtgggagggaggctggggaggtgcccaggaggaggagcgggagagggaggccctgatgctgaagcatctgcaggaagccctaggactgcctgctgggaggggggatgagaatcctgccggaactgttgagggaaaagaggactgggagatggaggaggaccagggggaggaagaggaggaggaagcaacgccaaccccatcctccggccccagcccctctcccacccctgaggacatcgtcacttacatcctgggccgcctggccggcctggacgcaggcctgcaccagctgcacgtccgtctgcacgcgttggacacccgcgtggtcgagctgacccaggggctgcggcagctgcggaacgcggcaggcgacacccgcgatgccgtgcaagccctgcaggaggcgcagggtcgcgccgagcgcgagcacggccgcttggagggctgcctgaaggggctgcgcctgggccacaagtgcttcctgctctcgcgcgacttcgaagctcaggcggcggcgcaggcgcggtgcacggcgcggggcgggagcctggcgcagccggcagaccgccagcagatggaggcgctcactcggtacctgcgcgcggcgctcgctccctacaactggcccgtgtggctgggcgtgcacgatcggcgcgccgagggcctctacctcttcgaaaacggccagcgcgtgtccttcttcgcctggcatcgctcaccccgccccgagctcggcgcccagcccagcgcctcgccgcatccgctcagcccggaccagcccaacggtggcacgctcgagaactgcgtggcgcaggcctctgacgacggctcctggtgggaccacgactgccagcggcgtctctactacgtctgcgagttccccttctagcggggccggtaccccgcctccttgcccatcccaccacccggcctttccctgcgccgtgcccaccctcctccggaatcgcccttcccttcctggccacgaatggcagcgtcctccccgacccccagtctgggcgcttctgggagggctcttgcggtgccggcactcctccttgttagtgtctttccttgaaggggcgggcaccaggctaggtccggtgccaataaatccttgtggaatctgaaaaaaaaaaaaaaaa

SEQ ID NO: 2220 - DNA, 1607 bp, Homo sapiens
  misc_feature (2)..(2): n equals a,t,g, or c
  misc_feature (16)..(16): n equals a,t,g, or c
  misc_feature (1576)..(1576): n equals a,t,g, or c
  misc_feature (1582)..(1582): n equals a,t,g, or c
  misc_feature (1603)..(1605): n equals a,t,g, or c
cnggcccccatttaangcaaaatgggcggtaggcgtgtmcggtwggargtctatataagcagagctcgtttagtgamccgtcagatcgcctggagacgccatcccacgctgttttgacctcccatagaagacwccggggaccgatccaagcctccggactctagctaggccgcgggacggatamcaatttcacacaggaaacagctatgaccactaggcttttgcaaaaagctatttaggtgacactatagaaggtacgcctgcaggtaccggtccggaattcccgggtcgacccacgcgtccggtgtggacctggactcgaatcccgttgccgactcgcgctctcggcttctgctccggggcttcttccctgcccgcccggggccctgaccgtggcttcttccccggcctgatctgcgcagcccggcgggcgcccagaaggagcaggcggcgcgggggcgcgctgggcgggggaggcgtggccggagctgcggcggcaagcgggctgggactgctcggccgcctcctgcccggcgagcagctcagaccatgtcgcctgaagaatggacgtatctagtggttcttcttatctccatccccatcggcttcctctttaagaaagccggtcctgggctgaagagatggggagcagccgctgtgggcctggggctcaccctgttcacctgtggcccccacactttgcattctctggtcaccatcctcgggacctgggccctcattcaggcccagccctgctcctgccacgccctggctctggcctggactttctcctatctcctgttcttccgagccctcagcctcctgggcctgcccactcccacgcccttcaccaatgccgtccagctgctgctgacgctgaagctggtgagcctggccagtgaagtccaggacctgcatctggcccagaggaaggaaatggcctcaggcttcagcaaggggcccaccctggggctgctgcccgacgtgccctccctgatggagacactcagctacagctactgctacgtgggaatcatgacaggcccgttcttccgctaccgcacctacctggactggctggagcagcccttccccggggcagtgcccagcctgcggcccctgctgcgccgcgcctggccggccccgctcttcggcctgctgttcctgctctcctctcacctcttcccgctggaggccgtgcgcgaggacgccttctacgcccgcccgctgcccgcccgcctcttctacatgatccccgtcttcttcgccttccgcatgcgcttctacgtggcctggattgccgccgagtgcggctgcattgccgccggctttggggcctaccccgtggccgccaaagcccgggccggaggcggccccaccctccaatgcccaccccccagcagtccggagaaggcggcttccttggagtatgactatgagaccatccgcaacatcgactgctacagcacagatttctgcgtgcgggtgcgcgatggcatgcggtactggaacatgacggtgcagtggtggctggcgcagtatatctacaagagcgcacctgcccgttcctatgttncccccntttgggggccccggggggggnnntt

SEQ ID NO: 2221 - DNA, 848 bp, Homo sapiens
  misc_feature (16)..(16): n equals a,t,g, or c
  misc_feature (774)..(774): n equals a,t,g, or c
  misc_feature (796)..(797): n equals a,t,g, or c
  misc_feature (811)..(811): n equals a,t,g, or c
  misc_feature (830)..(830): n equals a,t,g, or c
ttcccctatcgtttanggcacccggccggaggcggccccaccctccaatgcccaccccccagcagtcckgakaakgcggcttccttggagtatgactatgagaccatccgcaacatcgactgctacagcacagatttctgcgtgcgggtgcgcgatggcatgcggtactggaacatgacggtgcagtggtggctggcgcagtatatctacaagagcgcacctgcccgttcctatgtcctgcggtgagtgagcccgcccagtctcaggtgacactgcagaactacatctcccagcaggccccagggtagcctgcagcgtccctggctgggcccctgcccccggaggctcatgggaattgtagtttgtttagcctggttttgccctgcctctaattatagtggcagcatgccggtgtaaaatcgttccccctctcggggcctcagttgctacttctgtaaagtcagcctcactcagcagaagcaatgtactgagtcctgtggactcaatagccagccttcctggaatcttggccgtccaggttatggagaaaccttgaggagttagttgacctcttagttgcctcaagtgttgaatggagtgaatgctatttattactggtttcataggtagatagaaggactaaatgtgataaaatgtgaaatgtatttaatgtgaggcctgacaggtaagtgcgtgctgtgtattcatttttattgtttttcattcttccaatatttctcgagtggagactctgtgcttgacactggtatctgngcagcctttagaacagaaactnnacccggtgcggagnttaagccttggaatccacnctttgggaggcccaagca

SEQ ID NO: 2222 - DNA, 2144 bp, Homo sapiens
cccacgcgtccggtgtggacctggactcgaatcccgttgccgactcgcgctctcggcttctgctccggggcttcttccctgcccgcccggggccctgaccgtggcttcttccccggcctgatctgcgcagcccggcgggcgcccagaaggagcaggcggcgcgggggcgcgctgggcgggggaggcgtggccggagctgcggcggcaagcgggctgggactgctcggccgcctcctgcccggcgagcagctcagaccatgtcgcctgaagaatggacgtatctagtggttcttcttatctccatccccatcggcttcctctttaagaaagccggtcctgggctgaagagatggggagcagccgctgtgggcctggggctcaccctgttcacctgtggcccccacactttgcattctctggtcaccatcctcgggacctgggccctcattcaggcccagccctgctcctgccacgccctggctctggcctggactttctcctatctcctgttcttccgagccctcagcctcctgggcctgcccactcccacgcccttcaccaatgccgtccagctgctgctgacgctgaagctggtgagcctggccagtgaagtccaggacctgcatctggcccagaggaaggaaatggcctcaggcttcagcaaggggcccaccctggggctgctgcccgacgtgccctccctgatggagacactcagctacagctactgctacgtgggaatcatgacaggcccgttcttccgctaccgcacctacctggactggctggagcagcccttccccggggcagtgcccagcctgcggcccctgctgcgccgcgcctggccggccccgctcttcggcctgctgttcctgctctcctctcacctcttcccgctggaggccgtgcgcgaggacgccttctacgcccgcccgctgcccgcccgcctcttctacatgatccccgtcttcttcgccttccgcatgcgcttctacgtggcctggattgccgccgagtgcggctgcattgccgccggctttggggcctaccccgtggccgccaaagcccgggccggaggcggccccaccctccaatgcccaccccccagcagtccggagaaggcggcttccttggagtatgactatgagaccatccgcaacatcgactgctacagcacagatttctgcgtgcgggtgcgcgatggcatgcggtactggaacatgacggtgcagtggtggctggcgcagtatatctacaagagcgcacctgcccgttcctatgtcctgcggtgagtgagcccgcccagtctcaggtgacactgcagaactacatctcccagcaggccccagggtagcctgcagcgtccctggctgggcccctgcccccggaggctcatgggaattgtagtttgtttagcctggttttgccctgcctctaattatagtggcagcatgccggtgtaaaatcgttccccctctcggggcctcagttgctacttctgtaaagtcagcctcactcagcagaagcaatgtactgagtcctgtggactcaatagccagccttcctggaatcttggccgtccaggttatggagaaaccttgaggagttagttgacctcttagttgcctcaagtgttgaatggagtgaatgctatttattactggtttcataggtagatagaaggactaaatgtgataaaatgtgaaatgtatttaatgtgaggcctgacaggtaagtgcgtgctgtgtattcatttttattgtttttcattcttccaatatttctcgagtggagactctgtgcttgacactgttatctgtgcagcctttagaagcagaaactcagccgggtgcggcagctcacgcctggaatcccagcactttgggaggcccaagcaggtggatcatgaggtcaggagttcgagaccagcctgaccaacatggtgacatgctgtctctactaaaaatacaaaaaattaccctggtgtggtggtgggcgcctgtagtcccagctactcgggaggctgaggcaggagaatggcttgaacccgggaggcagaggttgcagggagctgggatctcgccactgcactccagcctgggcgacagcgagactccgtctcaaaaaaaaaaaaaaaaaaaaaa

SEQ ID NO: 2223 - DNA, 3335 bp, Homo sapiens
ctgttgctcaggtgaccagcttgtgtctctgggagggcgctgctttccccggccacccggcgcgatgatccagaatgtcggaaatcacctgcgacggggcttggcctctgtgttctccaaccgcacatcccggaagtcagccttacgtgcggggaacgacagtgccatggcagacggcgagggataccggaaccccacggaggtgcagatgagccagctggtgctgccctgccacaccaaccaacgtggtgagctgagcgtcgggcagctgctcaagtggattgacaccacggcttgcctgtccgcggagaggcacgctggctgcccctgtgtcacagcttccatggatgacatctattttgagcacaccattagtgttggacaagtggtgaatatcaaggccaaggtgaaccgggccttcaactccagcatggaggtgggcatccaggtggcctcggaggacctgtgctctgagaagcagtggaatgtgtgcaaggccttggccaccttcgtggcccgccgagagatcaccaaggtgaagctgaagcagatcacgccgcggayagaagaggagaagatggagcacagtgtggcggctgagcgccggcgcatgcgccttgtctatgcagacaccatcaaggacctcctggccaactgcgccattcagggcgatctggagagcagagactgtagccgcatggtgccggctgagaagacccgtgtggagagtgtggagctggtcctgcctccccacgccaatcaccagggcaacacctttgggggccagatcatggcctggatggagaatgtggccaccattgcagccagccggctctgccgtgcccaccctacgctgaaggccattgaaatgttccacttccgaggcccgtcccaggtcggcgaccgtctggtgctcaaagccatcgtgaacaatgccttcaaacatagcatggaggtgggcgtgtgcgtggaggcctatcgccaggaggctgagacccaccggcgccacatcaacagtgcctttatgacctttgtggtcctggacgcagatgaccagccccagttgctgccctggattcggccccagcccggcgatggtgagcggcggtaccgagaggccagtgccagaaagaagatccgcctggacaggaagtacatcgtgtcctgtaagcagacagaggtgcccctctccgtcccctgggaccctagcaaccaggtgtacctgagctacaataacgtctcctccttgaagatgcttgtggccaaggacaactgggtgctgtcctcggagatcagtcaggtccgcctgtacactctggaggatgacaagttcctctccttccacatggagatggtggtgcatgtggatgcagcccaggccttcctgctgctctcggacctgcgtcagaggccagagtgggacaagcactaccggagcgtggagctagtgcagcaggtagacgaggacgacgccatctaccacgtcaccagccctgccctcggaggtcacacaaagccccaggacttcgtgatcctggcctcgaggcggaagccttgtgacaatggggacccctatgtcatcgcgctgaggtcggtcaygctgcccacacaccgagagacgccagagtacagacgcggagagaccctctgctcaggcttctgcctctggcgcgagggggaccagctgaccaaggtatcctactacaaccaggccaccccaggtgttctcaactatgtgaccaccaacgtggccggcctctcctctgagttctacaccaccttcaaggcttgtgagcagtttctcttggacaaccggaatgatctggcccccagcctccagaccctctagatgccctcagtggccacatcatgcccactcccactccatcctgtccccaaggactcacatacagtgcctggagaaagccaaagacctttatttcttcctgcctccccgtgggaagcctccgccctgaggtccgctgrcccaccacccctgggtgctcagtttctaccaacatgagccagcaagtccttgtggtagccctggggtagcctgtagtagactcgggtcctgtccacagccctagctgccagcaatgctgtcctcacagaggcatagtcgcccccagctgggttgtgctccactgtgacggtggcccggggggaggatgccagcagcctgcctatggctccagctgtgctgtggcccagcagcatggcctgcatctggaaggacacaggttgccagagcccctggcacaactctagcatatctgtgagcagctgttccctgtagccactgcccagcacctcctcaggccagcctggtgccacagtcacgtgggggaagacctcagccacagctgtaagcagctctctgccagccacatggccggggaccgaaaaactcccgtgggagattttggccccaacccacacaggccaatgcaagaggccaaggctggagaggcgtgccagcaaggccagggatggccggagggctgcgggctccgctatttgcaaatggatgccccagtgtccgggatgtgtggccagctgctgcaggcaggactccagcgtcaggatgttgccacttggagtatgaacaatgggcacggggttttcagccacagttccctcgaggccagtgttcagcaggatcatgccttctgtgtctggaagaggcggcagaggcaacagtgtttaggatttgggttatcataaggtgttaagagtcccttgttaaaggggcagtgggagttatggggtcatcaaggaccttgcctctctggaatctgtcaacccagttttgggctccaggtggatgggttgctttataaatgtgcctggtgcatgagaaactcttgtttcagctcttggcctttacccatgactcagcctgggggctggtgccggccttgcctgcagcaatgtagctgaggactggtctgaaggccaggagccctgtgctcttgacatcactgtactccctctccctccccgcaaccctgccccaccttgcatccagggtatggtgtaaataaacctgtgttgccatggcaacagagaccggcggtacctgccccaagcaaaggacacccctgcagatgagctgggagcaccggggctgaagggtagaccttacctgggagggtcattgttgctgttttaccgctgccctggacgtcaggaaccagccactccacattcagaccgtcatccccaggcagctggagaagagggatcaggctgcctcccgtgtagtacattggtttycgtgtggcattcaaggccagctgcttgaactgtgacaggagagctcgtgccgaatt

SEQ ID NO: 2224 - DNA, 832 bp, Homo sapiens
tggcaggagtgtatgtgagtgtgtgtgtgcatacatgtgtgtgtatgtgtgtgcatacatgtgtgtgtatgtgtgtgcatacgtgtgtgtgtgtgcatgcatgtgtgtgggcgcatgtgtgcatgtgtgtgtgtgagtgtgtgtgttggggaggaggcatggcccttgggaaggtctgtccaggttggaagccacactccctcccctcagcatggaggtgggcgtgtgcgtggaggcctatcgccaggaggctgagacccaccggcgccacatcaacagtgcctttatgacctttgtggtcctggacgcagatgaccagccccagttgctgccctggattcggccccagcccggcgatggtagcggcggtaccgagaggccagtgccagaaagaagatccgcctggacaggaagtacatcgtgtcctgtaagcagacagaggtgcccctctccgtcccctgggaccctagcaaccaggtgtacctgagctacaataacgtctcctccttgaagatgcttggggccaaggacaactgggggctggcctcggattccattcatttcggctgacactctggaggatgacaagttcctctccttccacatggagatggtggtgcatgtggatgcagcccaggccttcctgctgctctcggacctgcgtcagaggccagagtgggacaagcactaccggagcggggagctagtgcagcaggtagacgaggacgacgccatctaccacgtcaccagccctgccctcggaggtcacacaaagccccaggacttcgcgatcctggcctcgagggggaagccttgggacaatggggacccc

SEQ ID NO: 2225 - DNA, 2751 bp, Homo sapiens
taaccctcactaaagggaacaaaagctggagctccaccgcggtggcggccgctctagaactagtggatcccccgggctgcaggaattcggcacgagtagagccgatctcccgcgccccgaggttgctcctctccgaggtctcccgcggcccaagttctccgcgccccgaggtctccgcgccccgaggtctccgcggcccgaggtctccgcccgcaccatgcggctgggcagtcctggactgctcttcctgctcttcagcagccttcgagctgatactcaggagaaggaagtcagagcgatggtaggcagcgacgtggagctcagctgcgcttgccctgaaggaagccgttttgatttaaatgatgtttacgtatattggcaaaccagtgagtcgaaaaccgtggtgacctaccacatcccacagaacagctccttggaaaacgtggacagccgctaccggaaccgagccctgatgtcaccggccggcatgctgcggggcgacttctccctgcgcttgttcaacgtcaccccccaggacgagcagaagtttcactgcctggtgttgagccaatccctgggattccaggaggttttgagcattgaggttacactgcatgtggcagcaaacttcagcgtgcccgtcgtcagcgccccccacagcccctcccaggatgagctcaccttcacgtgtacatccataaacggctaccccaggcccaacgtgtactggatcaataagacggacaacagcctgctggaccaggctctgcagaatgacaccgtcttcttgaacatgcggggcttgtatgacgtggtcagcgtgctgaggatcgcacggacccccagcgtgaacattggctgctgcatagagaacgtgcttctgcagcagaacctgactgtcggcagccagacaggaaatgacatcggagagagagacaagatcacagagaatccagtcagtaccggcgagaaaaacgcggccacgtggagcatcctggctgtcctgtgcctgcttgtggtcgtggcggtggccataggctgggtgtgcagggaccgatgcctccaacacagctatgcaggtgcctgggctgtgagtccggagacagagctcactggccacgtttgaccggagctcaccgcccagagcgtggacagggcttccatgagacgccaccgtgagaggccaggtggcagcttgagcatggactcccagactgcaggggagcacttggggcagcccccagaaggaccactgctggatcccagggagaacctgctggcgttggctgtgatcctggaatgaggccctttcaaaagcgtcatccacaccaaaggcaaatgtccccaagtgagtgggctccccgctgtcactgccagtcacccacaggaagggactggtgatgggctgtctctacccggagcgtgcgggattcagcaccaggctcttcccagtaccccagacccactgtgggtcttcccgtgggatgcgggatcctgagaccgaagggtgtttggtttaaaaagaagactgggcgtccgctcttccaggacggcctctgtgctgctggggtcacgcgaggctgtttgcaggggacacggtcacaggagctcttctgccctgaacgctcccaacctgcctcccgcccggaagccacaggacccactcatgtgtgtgcccacaagtgtagttagccgtccacaccgaggagcccccggaagtccccactgggcttcagtgtcctctgccacattccctgggaggaacaatgtccctcggctgttccggtgaaaagttgagccacctttggaagacgcacgggtggagtttgccagaagaaaggctgtgccagggccgtgtttggctacaggggctgccggggctcttggctctgcagcgagaaagacacagcccagcagggctggagacgcccatgtccagcaggcgcaggcctggcaacacggtccccagagtcctgagcagcagttaggtgcatggagagggtatcacctggtggccacagtcccccttctcacctcagcaatgatccccaaagtgagaggtggctcccccggcccccaccaccctcagcagccccaccccactcaaccctgagggtccccagggtcctgatgaagacctccgaccccagcgccaggctcctcggagcccaacagtcccaagggggcaggagacggggtggtccagtgctgaggggtacagccctgggccctgaccagccccggcacctgccatgctggttcccggaatgaatcagctgctgactgtctccagaagggctggaaaggatgctgccaggtgacccgaggtgcactcgccccagggagatggagtagacagcctggcctggccctcgggacacattgtctgccccgggrctatgggcaaatgcccctccttcttacttcccagaatcccctgacattcccagggtcagccaggacctgttacagccctggtcacttggaactgacagctgtgtgaggcctgcacttctcagacccagacttagaacaaaaggaggagtgaggactcaaggctacaatgaggttccagtacttgttacaagaaattggttttctgcaaaaaaagtccctacctgrgcctttaggtgaatgtgggatccactcccgcttttaacatgaaagcattagaagatgtgtggtgtttataaaaraaaaaaaaaaaaaactcgagggggggcccgtacgggaattcgccctatagtgagt

SEQ ID NO: 2226 - DNA, 2616 bp, Homo sapiens
agtagagccgatctcccgcgccccgaggttgctcctctccgaggtctcccgcggcccaagttctccgcgccccgaggtctccgcgccccgaggtctccgcggcccgaggtctccgcccgcaccatgcggctgggcagtcctggactgctcttcctgctcttcagcagccttcgagctgatactcaggagaaggaagtcagagcgatggtaggcagcgacgtggagctcagctgcgcttgccctgaaggaagccgttttgatttaaatgatgtttacgtatattggcaaaccagtgagtcgaaaaccgtggtgacctaccacatcccacagaacagctccttggaaaacgtggacagccgctaccggaaccgagccctgatgtcaccggccggcatgctgcggggcgacttctccctgcgcttgttcaacgtcaccccccaggacgagcagaagtttcactgcctggtgttgagccaatccctgggattccaggaggttttgagcattgaggttacactgcatgtggcagcaaacttcagcgtgcccgtcgtcagcgccccccacagcccctcccaggatgagctcaccttcacgtgtacatccataaacggctaccccaggcccaacgtgtactggatcaataagacggacaacagcctgctggaccaggctctgcagaatgacaccgtcttcttgaacatgcggggcttgtatgacgtggtcagcgtgctgaggatcgcacggacccccagcgtgaacattggctgctgcatagagaacgtgcttctgcagcagaacctgactgtcggcagccagacaggaaatgacatcggagagagagacaagatcacagagaatccagtcagtaccggcgagaaaaacgcggccacgtggagcatcctggctgtcctgtgcctgcttgtggtcgtggcggtggccataggctgggtgtgcagggaccgatgcctccaacacagctatgcaggtgcctgggctgtgagtccggagacagagctcactggccacgtttgaccggagctcaccgcccagagcgtggacagggcttccatgagacgccaccgtgagaggccaggtggcagcttgagcatggactcccagactgcaggggagcacttggggcagcccccagaaggaccactgctggatcccagggagaacctgctggcgttggctgtgatcctggaatgaggccctttcaaaagcgtcatccacaccaaaggcaaatgtccccaagtgagtgggctccccgctgtcactgccagtcacccacaggaagggactggtgatgggctgtctctacccggagcgtgcgggattcagcaccaggctcttcccagtaccccagacccactgtgggtcttcccgtgggatgcgggatcctgagaccgaagggtgtttggtttaaaaagaagactgggcgtccgctcttccaggacggcctctgtgctgctggggtcacgcgaggctgtttgcaggggacacggtcacaggagctcttctgccctgaacgctcccaacctgcctcccgcccggaagccacaggacccactcatgtgtgtgcccacaagtgtagttagccgtccacaccgaggagcccccggaagtccccactgggcttcagtgtcctctgccacattccctgggaggaacaatgtccctcggctgttccggtgaaaagttgagccacctttggaagacgcacgggtggagtttgccagaagaaaggctgtgccagggccgtgtttggctacaggggctgccggggctcttggctctgcagcgagaaagacacagcccagcagggctggagacgcccatgtccagcaggcgcaggcctggcaacacggtccccagagtcctgagcagcagttaggtgcatggagagggtatcacctggtggccacagtcccccttctcacctcagcaatgatccccaaagtgagaggtggctcccccggcccccaccaccctcagcagccccaccccactcaaccctgagggtccccagggtcctgatgaagacctccgaccccagcgccaggctcctcggagcccaacagtcccaagggggcaggagacggggtggtccagtgctgaggggtacagccctgggccctgaccagccccggcacctgccatgctggttcccggaatgaatcagctgctgactgtctccagaagggctggaaaggatgctgccaggtgacccgaggtgcactcgccccagggagatggagtagacagcctggcctggccctcgggacacattgtctgccccggggctatgggcaaatgcccctccttcttacttcccagaatcccctgacattcccagggtcagccaggacctgttacagccctggtcacttggaactgacagctgtgtgaggcctgcacttctcagacccagacttagaacaaaaggaggagtgaggactcaaggctacaatgaggttccagtacttgttacaagaaattggttttctgcaaaaaaagtccctacctgagcctttaggtgaatgtgggatccactcccgcttttaacatgaaagcattagaagatgtgtggtgtttataaaaaaaaaaaaaaaaaaa

SEQ ID NO: 2227 - DNA, 1969 bp, Homo sapiens; identical to SEQ ID NO: 1215
  misc_feature (10)..(10): n equals a,t,g, or c
  misc_feature (18)..(18): n equals a,t,g, or c
  misc_feature (30)..(30): n equals a,t,g, or c
  misc_feature (89)..(89): n equals a,t,g, or c
  misc_feature (159)..(159): n equals a,t,g, or c

SEQ ID NO: 2228 - DNA, 2259 bp, Homo sapiens
  misc_feature (7)..(7): n equals a,t,g, or c
  misc_feature (18)..(18): n equals a,t,g, or c
  misc_feature (34)..(34): n equals a,t,g, or c
  misc_feature (46)..(46): n equals a,t,g, or c
  misc_feature (92)..(92): n equals a,t,g, or c
  misc_feature (106)..(106): n equals a,t,g, or c
  misc_feature (540)..(540): n equals a,t,g, or c
  misc_feature (2245)..(2245): n equals a,t,g, or c
  misc_feature (2250)..(2250): n equals a,t,g, or c
  misc_feature (2255)..(2255): n equals a,t,g, or c
aagtaancccatgatcangcccactgcaactccnaaccctgggaanacagagcaaggccctgtcttggggggawamaaaattaggcgggccnycactgkagccccnagactctaaagtgtgtgcctagtgtaagctgtggatggcaaatgaattccaaaatgaaatcagccagccagctacaggcttacaacctagtggtggcagggagtgtacgggctccctcatctgcagctccttctctggatgaggcttgagagcaagtctggacaggcaaaccatctctcagtccacccaggacttaaaacacttcattgttttcccaaaagggaaaaatagcaaagccctttctgtacagtttctcctgcttagagttgggtggcagctctatacagcaaatgctgactttgctgtttgagatctttgatacagtgtgacctctgagctctgaaccaggctgcccctgacaaaaaaagtgtttcctcccacaggtaaacaaggaagaaggcactgcaaggagctctgggcctggctcagtggangctctgccacctttccaggatcaaaggccaagggaggtgacatggcaaggaaaagatctacaggggtcagacaaggaattttagaaccacaaggtcaaaaaaccatgggctctcaggagtcacagattattaaaactgcagcatttgagaccaaaacactcatgacttagagcaccttaagcctcatggtgttggcagagattacattggaagggaagagtcaaaaggtgcttctccactgataattctgatggcttctgggccctgggcatcttctgtgaggtcagagccttggcaaacgttccctcgtgagaatacggcctgaaggctccagctgcaggaggacggctgggagaacaggctttggatatcaaccgaatgccaacattctaccaaccaggccccactggggcaagagatcagaagagatctgatggtgccaggtttgcagtggccatcaaccaccaaaagactgtgagaacaataccatgatagtgtggcttgatggtatgtgctccttgccaggaacatgctgcgtgagtggcacttagtcgcccacagagcgctgcacagcaccacaaccgataacttccatttgcatagtgtttacagcacaggacagcattcatcccccaagccccagaaatggcctaggaagtaggggacaacaatggctctggccaggcagtggggatggctcttgagggccacattgggggacaccttgaaaagcagccaaaagacccacrccagccccagcytcatccacattcagttaaggtcactttaggtacctacattaatagaattcaatgattttcaaaaaccacagagagttctaggatagtcatgaccttgtatcaaaattatagaaatctctctataaaaaaatctctctgaagagttcagcatcccaggctgctcagagcagagtggaccagaagacggaggctggactgctttgccagtgtgagaaattcccagaagagcagaaagcacgtgcgatgggagatgctcctgctcctaggaacctgcaagtcctatgccctgggatatggagcgtctccctccttgaggggtccctggcactcttctccatctttggcaggtgagaagaggagtttgcaatcccggagcacctctggctgccaggcctggctggaaggaccagctcagactctggtccctccaggatcagagggtctggtgctccggccagaatcagaactcgtcccgcagcttagggggcctgtccatgccgaagaaagaagacggsctcccctggaggtcccgctcccgcttcacaaaggcagtgaaggaggagacacagttgccaataaagtggtcggcttggccgaggatgtacaggtcgacctgggccacctcaggcttcaggctcaccaccttcaccttccctttgaagagctgttggagctcaggcacataactctcggaatcagtagcaacgtagaccgactgggcatccagcgacctcacccagagcttcacagccctctggatctccttcaggtcaggcaggcacatagtcatcgtgaggggggccgctgtgctgcggctgtagcccacacactgcggagaggccatgaagtgcgagcctgcagtcccgtccttcagcatggcacaggcgttcttccagtcagagccaatgcgcagatgaatgcccgggtaggttcgggcaaagtgncatgnagttntcct

SEQ ID NO: 2229 - DNA, 858 bp, Homo sapiens
  misc_feature (811)..(811): n equals a,t,g, or c
  misc_feature (820)..(820): n equals a,t,g, or c
  misc_feature (843)..(843): n equals a,t,g, or c
  misc_feature (852)..(852): n equals a,t,g, or c
  misc_feature (856)..(856): n equals a,t,g, or c
gcccacgcgtccgcccacgcgtccgcccacgcgtccgcttggattgagtaccagcatcacaagcctcctttcaccaacctccatgtgtcctaccagaagtacttcaagctggagcccctccaggcttaccatcgggtcatcagcttggaggatttcatggagaagctggcacccacccactggccccctgagaagcgggtggcatactgctttraggtggcagcccagcgaagcccagataagaagacgtgccccatgaaggaaggaaacccctttggcccattctgggatcagtttcatgtgagtttcaacaagtcggagctttttacaggcatttccttcagtgcttcctacagagaacaatggagccagagattttctccaaaggaacatccggtgcttgccctgccaggagccccagcccagttccccgtcctagaggaacacaggccactacagaagtacatggtatggtcagacgaaatggtgaagacgggagaggcccagattcatgcccaccttgtccggccctatgtgggcattcatctgcgcattggctctgactggaagaacgcctgtgccatgctgaaggacgggactgcaggctcgcacttcatggcctctccgcagtgtgtgggctacagccgcagcacagcggcccccctcacgatgactatgtgcctgcctgacctgaaggagatccagagggctgtgaagctctgggtgaggtcgctggatgcccagtcggtctacgttgctactgattccgagagttatgtgcctgagctcaacagctcttcaaagggaaggngaaggtggngagctgaacctgaggtggcccangtcgactgnaatnct

SEQ ID NO: 2230 - DNA, 659 bp, Homo sapiens
  misc_feature (25)..(25): n equals a,t,g, or c
  misc_feature (91)..(91): n equals a,t,g, or c
  misc_feature (106)..(106): n equals a,t,g, or c
cttggcgaatgggaatccctttccntagggaaaagttagcccgcgctcacgctgggtaaagccagcttaagctccttccccaaacctcccntagctgacttcttcntctgggcactccctctggtcactgcccacgcccaggtgtaagcccgctgctctccagctgggcctcctgatggcctgattttactcttgcccgcatctatgcgaccctctgcctggacctgtccctcctctgtcccctgccctgttctccattacaggggttgatccctcacacggaatgtctcgggctcccctgccagctggcttctgccgatggaggtgctggtaggagactggaggtggtggtaaggcasccagggccctgctcccctcgttctgcagccgctgataggcaggctgtgtggctccagcttccctggtgacatagcctctccctgtgtccctctggcctgcaggtggtggtggctcctgctattgctaatcccaaggtcgctcactgccctcattaggcctctgagctcttcggtcacccggtggccacttcttcacattcaagtcccactgttccgaatactcccgccggcctgggttacattcaacttgagttatgggtcacgctacctctttgcagagcccctgcagtggctccctgg

SEQ ID NO: 2231 - DNA, 1165 bp, Homo sapiens
  misc_feature (733)..(733): n equals a,t,g, or c
gattcggcacgagctcccctgtgtttccgaaatggggaaagaaaggccaggcgcagtggctcacgcctggaatcccagcactttttgggaggcggaggtgggcagatcccttgaggtcaggagttcgagaccagcctggccaacatggcgaaaccccgtctctactaaaaatacagaaattagccagccgtggtgtcaggtacctgttgtcctggctactcgggaggctgaggcaggagaatcacttgaacccggaaggcggagattgcagtgagccaagatcatgctgcagtactccagcctgggtgacagagtgagactctgtctcaaaaaaataaggaaaaagaaaaggaaggaaagagcccacctcgctggttatgagctcasgccagtaattcaactacgtttggagactgtggctctgtttctagccacggggaaaaaaacctatgaacaaacaggcacagcccctgcctccacgaagtgatgacttcatgccgcagacagcgaaccctcacctcccaacagatgcctcagtgactgcgggggaaaagccacgaaacagagggccagatgttgagactgaaccattcagggcctgagctgtctggaaggccggggcaggtccctgaggtggtgagttgggaaagagtggaacattccagaaagcaagagcctcaggtatgagtgctctgagctccaggggttcatcttgtcctctataaaggggggnatgacacagcgcagttgctggggaaaacagtggggttcctcaaagagtcacacacagagttactgtcattaccaaccagcgactccagtcctagggatctaccaaaagaactgaaaacaggcactcggcaaacacttgcacacacgtgcatagcagcatgagtcacggcagccgaaaggcgcaaacaactcgatagccatcaatagatgaatggataaacaaattgtggccgggcacagtgctcacgcctggaatcccagcactttgggaggctgaggtaggaagatagcttgaagccaggagtttgagaccatcttaggcagcaaagtgggatgcccatctgtaaaaaaaaatttttttttaattagctgggcatggtggcacacttgtagtctcggtggctcaggagactgagggaggaggatctctcga

SEQ ID NO: 2232 - DNA, 1671 bp, Homo sapiens; identical to SEQ ID NO: 28

SEQ ID NO: 2233 - DNA, 1249 bp, Homo sapiens
  misc_feature (1239)..(1239): n equals a,t,g, or c
ggcacgagagggactggggcctgatctcctgggtctgagggagaaggggtggggtctggactcctgggtctgagggaggaggggctgggcctgsactyctsggtctgagggaggaggggctggggtcctggactcctggatctgggggcagtgggcactggggacctggactcgtargtcctgactcccagcctcctcctcaggagcgcctggaccatgctgctgagcgcctactggcacggcctccacccgggctactacctgagcttcctgaccatcccgctgtgcctggctgccgagggccggmtggagtcagccctgcgggggcggctgagcccagggggccagaargcctgggactgggtgcactggttcctgargatgcgcgcctatgactacatgtgcatgggcttcgtgctgctctccttggccgacacccttcggtactgggcctccatctacttctgtatccacttcctggccctggcagccctggggctggggctggctttaggtgggggcagccccagccggcggaaggcagcatcccagcccaccagccttgccccggagaagctccgggaggagtaagctgtcacgacgctccctctgccagctggtcccgggaattctgtgaaccaggctgctgtctcctccccagaaagagtccttaccttggagagggtcctggagagaatttcctcttccccagctaaataccctgcctgcaactgaagcagacccgggggtgtcctccctgccctctgcccagaggccacctccactcctacaaaatcaaagtattgtccagacaagagtcactggcccctgctccagcttctgggtatccagagagcactgcacttccccaaaacggaaggggcccctgggcagtgggttttgggcaaattccctttctttgcatccacaatgtggggtcggagcttgggggcaggtcctgggagtgggaagcctcttccttgtgtctttcgctccacttttagctcatcgcaccaatattgcagacttggaaggaagcataagcttcccatttcacaaaggggaaactgaggtgcgggtgcgcgggcctggggacggccgtcccatggcttccatctgagccacctcgggaccccagcrctcctggcgccctcttctcatcgcttggcctatgacaggtcaccgtgtgtaaatctttcccaataaagtgttgcacaaagaaaaaaaaaaaaaaagggngcccgtttta

SEQ ID NO: 2234 - DNA, 874 bp, Homo sapiens; identical to SEQ ID NO: 487
  misc_feature (152)..(152): n equals a,t,g, or c
  misc_feature (828)..(863): n equals a,t,g, or c

SEQ ID NO: 2235 - DNA, 895 bp, Homo sapiens
  misc_feature (895)..(895): n equals a,t,g, or c
ccacgcgtccgagtacgctaaggtactcataacgtgacaataaaacgtaacactttaattgactcattaaatctgaaatatatttttctcctctttaaacagctttagtgcagccgtcattatccatgacaccggaaactgtgaaagatgttggatttggtagccttgttataccaggcggttctgttgccagcaatcttgctacttccgctctgccagctggaaatgtttttaatgctccaactaaacaggcagagcctgaagaaaaagtacctcatcttatagaccaccagatttcttctggtgaaaacaccagatcaggtaaataataataataaaatttaaaaaaagaggytgcctctctgtatttggtgtttaattctggggtggcatgcgtttgtaaccacttcaatctacagatgctgaaatgtcgcactttttttttaaaagagatcactatgtcctaaaatttctatttgaaaaagtggccttctgttcaggataatctagatttcaatatgtttccattaagaccctcacaccaccacccccttttttttgtcctattgggactacttcagtgtgttgtcaaaataatactgcacaaaatctgtatacttataggaagataaaaatgaacaagtattgggtgtgagtaacttctatcgggaacttacttctaataggtattatccagctagctctagaagataaatatggtgtttgaaagcagtaagtcctttttctatggtcccactgttggtacattaagaattatggtttagaggcacttgaccttgatgcctgtttgggtctcttctaagcatacttttctttcctttctttcctgtcctaaagccttttaaacctccactcctgttcttaaaaaaaaaan

SEQ ID NO: 2236 - DNA, 1621 bp, Homo sapiens
gaattcccgggtcgacccacgcgtccggagaatatctacttccagcagtacatttaaagtttggtttataggaattaatttgagaatcaaaatgtaggaattttaaaataatttgctcactaaaaaaattaagatgttaaataatgggttattctttgtacttatctctgtcagaaactcttgctttactctttgttctcccagcagtttttggtttaatttctaatgtgtctaatttgtgtaggcgtcgaccagaagattatgatattcataacagcagaaagaaaccaaggattgactatccccctgagtttcaccagagaccagggtatttaaaggatccacgataccaggaagtggacagacgattttcaggagttcgccgagatgtgtttttaaatgggtcctacaatgattatgtgagggaatttcataacatgggaccaccaccaccttggcaaggaatgcccccttacccaggaatggaacaacctccacaccatccttactatcagcaccatgctccacctcctcaagctcatcccccttactcaggacatcatccagtaccacatgaagcaagatacagagataaacgagtacatgattatgatatgagggtggatgatttccttcgtcgcacacaagctgttgtcagtggccggagaagtagaccccgtgaaagagaccgggaacgagagcgagaccgccctagagataacagacgagacagagagcgagatagaggacgtgatagagaaagagaaagagagcgattatgtgatcgagacagagaccgaggggagagaggtcgatatagaagataatgggcttttggaagcactgattgtttaaagatacaaaaaatcttgtattttttttttgtgtgtgtttacaagtagtaaatttattttcagctgtctgcctatgaagttcattgtgtagaaggatttattatgaccccctttgttccaagcatgcagtatcataagaactggaaaaactcaaatccgccaaaaatccacagctgacagttgaattgacacttttattggggcagaatggaacagtccaagaatgtagatactgattctttctccataaatgttcttatagtgtgttcatcctagagttatttttttgtttgtttttttcctttttggatcttgattgataactgccatgatattttgctttgatgtgtttctacatgtagttgcacacggttcagtaaaaataatgctgctatcgagtatgcaaatattgaagtatgatggtttgactgtatggcagtgttgtagcagcctcttgtttttttccccattgcctctttttttaaaaaacttataaagtcactttttatttttcctcagtcttcaatgacgagagcaatattaagaagacattgctatctaatttttaatctttttaaatgaaaaattcctatgttcagtagcgtggttgatgctattgtttagccttcccctccaaattgtatacattggcttggaatgttcacaacttgcgtgcgtggcagcggaagacgattcccatattctacattgctactgttttgtataaaataaattggtaaagattgaaaaaaaaaaaaaaaaaaaaa

SEQ ID NO: 2237 - DNA, 868 bp, Homo sapiens
ccatccctgagatctttttataaaaaacccagtctttgctgaccagacaaagcataccagatcycaccagagagtcgcagacactatgctgcctcccatggccctgcccagtgtatcttggatgctgctttcctgcctcatgctgctgtctcaggttcaaggtgaagaaccccagagggaactgccctctgcacggatccgctgtcccaaaggctccaaggcctatggctcccactgctatgccttgtttttgtcaccaaaatcctggacagatgcagatctggcctgccagaagcggccctctggaaacctggtgtctgtgctcagtggggctgagggatccttcgtgtcctccctggtgaagagcattggtaacagctactcatacgtctggattgggctccatgaccccacacagggcaccgagcccaatggagaaggttgggagtggagtagcagtgatgtgatgaattactttgcatgggagagaaatccctccaccatctcaagccccggccactgtgcgagcctgtcgagaagcacagcatttctgargtggaaagattataactgtaatgygargttaccctatgtctgcaagttcamtgactagkgcaggwgggaagtcagcagcctswgyttggygtgcarctcatcatggrcatgagaccagtgtgargactcaccctggaagagaatattctccccaaactgccctacctgactaccttgtcatgatcctccttctttttcctttttcttcaccttcatttcaggcttttctctgtcttccatgtcytgagatctcagagaataataataaaaatgttactttatacttaaaaaaaaaaaaaaaagggcggccgct

SEQ ID NO: 2238 - DNA, 1080 bp, Homo sapiens
  misc_feature (1065)..(1065): n equals a,t,g, or c
  misc_feature (1067)..(1067): n equals a,t,g, or c
gcagaaaggcagaaaggagaaaattcaggataactctcctgaggggtgagccaagccctgccatgtagtgcacgcaggacatcaacaaacacagataacaggaaatgatccattccctgtggtcacttattctaaaggccccaaccttcaaagttcaagtagtgatatggatgactccacagaaagggagcagtcacgccttacttcttgccttaagaaaagagaagaaatgaaactgaaggagtgtgtttccatcctcccacggaaggaaagcccctctgtccgatcctccaaagacggaaagctgctggctgcaaccttgctgctggcactgctgtcttgctgcctcacggtggtgtctttctaccaggtggccgccctgcaaggggacctggccagcctccgggcagagctgcagggccaccacgcggagaagctgccagcaggagcaggagcccccaaggccggcctggaggaagctccagctgtcaccgcgggactgaaaatctttgaaccaccagctccrggagaaggcaactccagtcagaacagcagaaataagcgtgccgttcagggtccagaagaaacaggatcttacacatttgttccatggcttctcagctttaaaaggggaagtgccctagaagaaaaagagaataaaatattggtcaaagaaactggttacttttttatatatggtcaggttttatatactgataagacctacgccatgggacatctaattcagaggaagaaggtccatgtctttggggatgaattgagtctggtgactttgtttcgatgtattcaaaatatgcctgaaacactacccaataattcctgctattcagctggcattgcaaaactggaagaaggagatgaactccaacttgcaataccaagagaaaatgcacaaatatcactggatggagatgtcacattttttggtgcattgaaactgctgtgacctacttacaccatgtctgtagctattttcctccctttctctgtacctctaagaagaaagaatctaactgaaaataccaaaaaaaaaaaaaaaaaacntnggggggggccccg

SEQ ID NO: 2239 - DNA, 2020 bp, Homo sapiens; identical to SEQ ID NO: 1500
  misc_feature (2010)..(2010): n equals a,t,g, or c
  misc_feature (2019)..(2019): n equals a,t,g, or c

SEQ ID NO: 2240 - DNA, 549 bp, Homo sapiens
aattcggcacgagagggctgcatccttgcgttctgtgagctctgcccgttgggagcatccatgctgatgtgcaggggccgtgcagcactgcattcttcttgccttctctgttctgtttagtacaaccaccccagcaggtctccagttcctgccaggttagtgtggatggcccagcaccatctcctctccatcttgttggctatcctctcttgttcctcacaaccccgccaggktcgcggctcaggagctctgccgtgtgaagtgtgctcagcagttctcctcacatgtctacgcaaaatctctggctccctgtgtgtctgagcccaacagacacactgagcacaggagttggctctcagctcctcccagcttgccgtgactgagccctgccgtcctgtggcaccgccasggagaccacagtgtccaactgtccaacctttacgtaattggcatcccaggaggagaagcaagagtgaatggggcaggaaaagatcattaaagaaatcgtggctgacataaaaaaggrtgagttcatgtcctttgtaaggg

SEQ ID NO: 2241 - DNA, 1116 bp, Homo sapiens
  misc_feature (18)..(18): n equals a,t,g, or c
  misc_feature (21)..(21): n equals a,t,g, or c
ttcctgaagtaaggaccnttnttcagggaatgtgtgaaacttaacaaggggaagatggggctggagatccaccagctgaaggtgccaacacagtgatgataagtccggtgtctggggctggaaggtcttaagtcttagctgttggtttggtcgttgggtctatagtagaaaactgaagcatcagtatattatttatctcaaattgacatctaattctgttgagacttctagaagaaatgtaatggcattcttccctttctcatcttctgtgcctctcagtctccctcttcttactcaagagggggttggacagttattttcactgtttcttttctgctactcccacattttaaatcttcatcctttcctttttctcttagagagtatggatgtgtttgtatctgtagtaatttgagatcacagaatgcgatggagtaccatcttgaaaagaggctatatcttgcttgctgttgtatttcccccacagagaattaccaattctggaaaggattacaaaagaagrggacattgtttaggtaagaagatggtgaagaagaatgcatatggcaagttaatgggacagttgtgaatagtgactgtaggattaatatctgacaggcaggtctgttgatctcaatactcctagagaagggatgtgaaagatgccaagcaaagcattgactcagctataatagctaaaaaacatagtcactaattgacaacttagcatttaagaacgtctgaaagaatagtctcggtggtctgtgtttcgtttgacttggtccgcattgtcaggcttggtgctgccccgtctctgttgctcagatcctctgccccagtaccagtagaccaagcttttctcagaatgtgtcttgttccaacagaaccagaaatctgaaatatcagaaaggatttgctccaacacatagtacagttctcatggttcctggtctgcagtgagctaagtgcacaaggcccaggaaggggagcggctcggatttggagaggcagtcagagttcactacgcttagtggcttagtttctgtgtttttgccccaggtaatagcagcaccttgtatctgagtcctccttaaaaaaaaaaaaaaaaaactcgag

SEQ ID NO: 2242 - DNA, 1983 bp, Homo sapiens; identical to SEQ ID NO: 221

SEQ ID NO: 2243 - DNA, 2657 bp, Homo sapiens
ctgcggggcttgtgctctgcaaagactctgctgctggggattcagctctagaggtcacagtatcctcgtttgaaagataattaagatcccccgtrgagaaagcagtgacacattcacacagctgttccctcgcatgttatttcatgaacatgacctgttttcgtgcactagacacacagagtggaacagccgtatgcttaaagtacatgggccagtgggactggaagtgacctgtacaagtgatgcagaaaggagggtttcaaagaaaaaggattttgtttaaaatactttaaaaatgttatttcctgcatcccttggctgtgatgcccctctcccgatttcccaggggctctgggagggacccttctaagaagattgggcagttgggtttctggcttgagatgaatccaagcagcagaatgagccaggagtagcaggagatgggcaaagaaaactggggtgcactcagctctcacaggggtaatcatctcaagtggtatttgtagccaagtgggagctattttcttttttgtgcatatagatatttcttaaatgaagctgctttcttgtcttttatttctaaaagcccccttataccccactttgtgcagcaaagatccccgtgcaggtcacagcctgatttgtggccaggctggacaaattcctgaggcacaacttggcttcagttcagatttcaagctgtgttggtgttgggaccagcagaaggcaaacgtccagccaacacacaggactgtaagaggactctgagctacgtgccctgtgaagacccccaggctttgtcataggaggtcgttcagcttccccaaagtcagaggtgatttgatttggggaagactgaatattcacacctaagtcgtgagcatatcctgagttttacttccttatggcttgccctccaagttctctctctcatacacacacacacccttgctccagaatcaccagacacctccatggctccagctatgggaacagctgcattggggctgcctttctgtttggcttaggaacttctgtgcttcttgtggctccactcgcgaggcagctcggaggtgtggactccgattgggctgcaggcagctctgggacggcacagggcgggcgctctgatcagctcgtgtaaaacacaccgtcttcttggcctcctggccagtctttctgcgaatagtcctctccctggccagttgaatgggggaagctgctggcacaggaaggagaggcgatcccggctgaggcttaggaaattgctggagccggctccaagcagataattcactggggaggttttcagagtcaaacatcattctgcctgtgttgggggccaggtgtgtcacacaagcatctcaaagtcaaaagccatctggggctgctgcttctctttctcaggctctggggaaaggaatctccctctcctctcacttgattccaagtgtggttgaattgtctggagcactgggactttttttctcttttccttgatggaccaacagtgcaaatgcaatctcgccatttaactttcaggtcgatttcctttcctgatcagacatctttgtgccccctttaggaaggaaaagaatacacctacgatgtgccaggcactgtgttaggcgcttttatatagatcctcgttaggatgagactaagggatgaggacatctctttataaaaggcccctaagtaatggataaacagaaacacttagaggtgagaaggtctgtcttcaagatccaaggtaagattgccttcagtctgatgtttgttctcaaggacttatcccctacaatattctcccactccatacttctccttctaccccaccatgtgctcccgtgcactcctcagatggtcagaggggtaacccaagtccttagagaatttggggaccaatagaatatgtgatgtgtgaattttctttaaaaaacttaaggagtctttgctaccttctgcttgttgagttgttttggcattcatattaaaagccagcatctcactatttattgacaggttgggctgtgtgtgtgcgcatgtgtgtatacatttccaggcgtgcctgtgtcctgtagctttttaaaaggaaacccagtcatcccactatgaatctggcatcttcttatgcttctagtgttttggccatacatcaaccaaggggtttaatttatccaatgcttgacgacatgttcaggaggggctggatcaaattttgagagggttatgggaaagggagggggagaagaaattgacatttattttattatttattttaaatgtttacatcttctttatgttgtatcaagcctgaatagaaactgatagcattaaaatactccgttcctctctctcttctcgcttcctttttttttttttttaaatttaggataacacatttttgtttctaaagtgatttgtgatttgtgctgtataaactgtataaaaggttctgtttttaaaggtggattttcattcctctggggacagtggtcgccaagacatctacattgtaagagaacacagtggaagatcctgtcctgattctcaaaaattattttctctgtatgattaaaagtttattccatttaaaaaaaaaaaaaaaaaaaaaaaaaaccacggcggccgctctagagtatccctcaaggggc

SEQ ID NO: 2244 - DNA, 1272 bp, Homo sapiens
  misc_feature (1184)..(1184): n equals a,t,g, or c
  misc_feature (1213)..(1213): n equals a,t,g, or c
  misc_feature (1224)..(1224): n equals a,t,g, or c
  misc_feature (1232)..(1232): n equals a,t,g, or c
  misc_feature (1235)..(1235): n equals a,t,g, or c
  misc_feature (1248)..(1248): n equals a,t,g, or c
  misc_feature (1250)..(1250): n equals a,t,g, or c
ggccttacggcacagtagagagcttccagggctggctggcgtgggatacccgtaccacagaaatgcagggaccattgcttcttccaggcctctgctttctgctgagcctctttggagctgtgactcagaaaaccaaaacttcctgtgctaagtgccccccaaatgcttcctgtgtcaataacactcactgcacctgcaaccatggatatacttctggatctgggcagaaactattcacattccccttggagacatgtaacgacattaatgaatgtacaccaccctatagtgtatattgtggatttaacgctgtgtgttacaatgtcgaaggaagtttctactgtcaatgtgtcccaggatatagactgcattctgggaatgaacaattcagtaattccaatgagaacacctgtcaggacaccacctcctcaaagacaacccagggcaggaaagagctgcaaaagattgtggacaaatttgagtcacttctcaccaatcagactttatggagaacagaagggagacaagaaatctcatccacagctaccactattctccgggatgtggaatcgaaagttctagaaactgccttgaaagatccagaacaaaaagtcctgaaaatccaaaacgatagtgtagctattgaaactcaagcgattacagacaattgctctgaagaaagaaagacattcaacttgaacgtccaaatgaactcaatggacatccgttgcagtgacatcatccagggagacacacaaggtcccagtgycattgcctttatctcatattcttctcttggaaacatcataaatgcaactttttttgaagagatggataagaaagatcaagtgtatctgaactctcaggttgtgagtgctgctattggacccaaaaggaacgtgtctctctccaagtctgtgacgctgactttccagcacgtgaagatgacccccagtaccaaaaaggtcttctgtgtctactggaagagcacagggcagggcagccagtggtccagggatggctgcttccygwtacacgtgwacaagagtcacaccatgtgtaattgcagtcacctgtccagcttcgctgcctgatggccctgaccagccaggaggaggatccccggctgctggcatcacctacgtggggctgagcggctctctgctgggcctcctcctggcggncctccttttttcctgtgtaaggcattcanaacaccagcanctcactgnatntgcaggtcttcgntnttggctctttctgggccacctt

SEQ ID NO: 2245 - DNA, 373 bp, Homo sapiens
  misc_feature (319)..(319): n equals a,t,g, or c
ccggatgttctgccaggagaattactctcacttggtcatcatcaatagctttgctgagcacgtgagttcttcccactgaacctttgagaaccttcagggacagcctgcttctcttccaggatgcacacatccctcccttcccacacatttgttgagagcctattgtggagaacaaacagcttgggaagtaaaggttgattacttcctctccaaggatgatatgtttaatgaattcccttttccttagcttcattcttcataatgccaaagagatccatggatatgattttccatatggagttgaatattctagttttantattttctcttcacttgtccggagggcatttcccctytccstcccccgcccccc

SEQ ID NO: 2246 - DNA, 554 bp, Homo sapiens
  misc_feature (496)..(496): n equals a,t,g, or c
gaattcggccttacggcacagtagagagcttccagggctggctggcgtgggatacccgtaccacagaaatgcagggaccattgcttcttccaggcctctgctttctgctgagcctctttggagctgtgactcagaaaaccaaaacttcctgtgcctcctcctggcggcctcacttttctcctgtgtaaagccatccagaacaccagcacctcactgcatctgcagctctcgctctgcctcttcctggcccacctcctcttcctcgtggggattgatcgaactgaacccaaggtgctgtgctccatcatcgccggtgctttgcatatctctacctggccgccttcacctggatgctgctggagggtgtgcacctcttcctcactgcacggaamctgacagtggtcaactactcaagcatcaatagactcatgaagtggatcatgttcccagtcggctatggcgttcccgctgtgactgtggccatttctgcagcctnctggcctcacctttatggaactgctgatcgatgctggcttcacctggaccagggattc

SEQ ID NO: 2247 - DNA, 1303 bp, Homo sapiens
  misc_feature (54)..(54): n equals a,t,g, or c
  misc_feature (57)..(58): n equals a,t,g, or c
acacgccacaagagtcacaccatgtgtaattgcatgtcacctgtccagcttcgntgnnttgatggccctgaccagccaggaggaggatcccgtgctgactgtcatcacctacgtggggctgagcgtctctctgctgtgcctcctcctggcggccctcacttttctcctgtgtaaagccatccagaacaccagcacctcactgcatctgcagctctcgctctgcctcttcctggcccacctcctcttcctcgtggggattgatcgaactgaacccaaggtgctgtgctccatcatcgccggtgctttgcactatctctacctggccgccttcacctggatgctgctggagggtgtgcacctcttcctcactgcacggaacctgacagtggtcaactactcaagcatcaatagactcatgaagtggatcatgttcccagtcggctatggcgttcccgctgtgactgtggccatttctgcagcctcctggcctcacctttatggaactgctgatcgatgctggctccacctggaccagggattcatgtggagtttccttggcccagtctgtgccattttctctgcgaatttagtattgtttatcttggtcttttggattttgaaaagaaaactttcctccctcaatagtgaagtgtcaaccatccagaacacaaggatgctggctttcaaagcaacagctcagctcttcatcctgggctgcacatggtgtctgggcttgctacaggtgggtccagctgcccaggtcatggcctacctcttcaccatcatcaacagcctccaaggcttcttcatcttcttggtctactgcctcctcagccagcaggtycagaaacaatatcaaaagtggtttagagagatcgtaaaatcaaaatctgagtctgagacatacacactttccagcaagatgggtcctgactcaaaacccagtgagggggatgtttttccaggacaagtgaagagaaaatattaaaactagaatattcaactccatatggaaaatcatatccatggatctctttggcattatgaagaatgaagctaaggaaaagggaattcattaaacatatcatccttggagaggaagtaatcaacctttacttcccaagctgtttgttctccacaataggctctcaacaaatgtgtggkaagggagggatgtgtgcatcctggaagagaagcaggctgtccctgaaggttctcaaaggttcagtgggaagaactcacgtgctcagcaaagctattgatgatgaccaagtgagagtaattctcctggcagaacatccgg

SEQ ID NO: 2248 - DNA, 1120 bp, Homo sapiens
aggggactctcaccctctcccagcaatgtctaaagtcaggcatctgaaaaccagcagtaatcctgcctctgaagtttatcaggaaaggagcttaaaagagaaccaaattcagcctgtgttggaactctcagtcccagaggggtgtggtttatagctctccggcctgctgttggacttaggctgtgacccacagaaggacgccagaaagtactcaagacattcacggtgccccggtcagcactcgccatgacgaagacttctacatgcatataccacttccttgttctgagctggtatactttcctcaattattacatctcacaggaaggaaaagacgaggtgaaacccaaaatcttggcaaatggtgcaaggtggaaatatatgacgctgcttaatctgctcttgcagaccattttctacggggtcacctgcctggatgatgtgctgaaaagaaccaaagggggaaaagacattaagttcctaactgccttcagagacctgcttttcaccactctggcttttcctgtatccacgtttgtatttttggcattctggatcctctttctctacaatcgagatctcatttaccccaaggtcctagatactgtcatccccgtgtggctgaatcatgcaatgcacactttcatattccccatcacattggctgaagtcgtcctcaggcctcactcctatccatcaaagaagacaggactcaccttgctggctgctgccagcattgcttacatcagccgcatcctatggctctactttgagacgggtacctgggtgtatcctgtgtttgccaaactcagcctcttgggtctagcagctttcttctctctcagctacgtcttcatcgccagcatctacctacttggagagaagctcaaccactggaaatggggtgacatgaggcagccacggaagaagaggaagtaattgcacaccattttccaagaaccaagaaagaagaaaacacaagagatttttctcatctttttttttttttttctggtggagggaggtggtggaggaacatagcaaagtaggagggacagagagtgatacttaaatttaataagaggttcgtgaaggtaaaaaaaaaaaaaaaaaactcgag

SEQ ID NO: 2249 - DNA, 510 bp, Homo sapiens
  misc_feature (19)..(19): n equals a,t,g, or c
  misc_feature (34)..(34): n equals a,t,g, or c
  misc_feature (77)..(77): n equals a,t,g, or c
  misc_feature (143)..(143): n equals a,t,g, or c
ggaatctggccccaccccnaggccttccccaaantggctggggattaaaaggtgtggagcccaccctggctggcccntatgtggggttttttaactactaaaaattatttttgtaatgattgagtcttctttatggaaacaantggcctcagcccttgcgcccttactgtgattcctggcttcattttttgctgatggttccccctcgtcccaaatctctctcccagtacaccagttgttcctcccccacctcagccctctcctgcatcctcctgtacccgcaacgaaggcctgggctttcccaccctccctccttagcaggtgccgtgctgggacaccatacgggttggtttcacctcctcagtcccttgcctaccccagtgagagtctgatcttgtttttattgttattgcttttattattattgcttttattatcattaaaactctagttcttgttttgtctctcaaaaaaaaaaaaaaaaaaaaaaaaaaaaaaaaaaaaactcga

SEQ ID NO: 2250 - DNA, 1362 bp, Homo sapiens
ggcacgaggagtcctgatcaagtgatacaaatgagctgcaatggtgacataaactcttgacagagattggaaaagtagctggaacaccatcttttcttttaactttttatggtgcttctgttggcatagttggggaaagcacctacaacatgagttttatcatgaagcttcacagacactttcaaagaacagtcattctgcttgccactttttgtatggtgagcattatcatttctgcttactacctgtacagtggctacaaacaggaaaatgaactctctgagacggcttcagaagttgactgtggcgacctccaacacctaccatatcaactaatggaagtgaaagcaatgaagctttttgatgcctcaaggacagaccccacagtcctagtatttgtagagagccagtactcatctcttggtcaagacatcattatgattctagaatcaagtagattccagtatcacattgaaattgcccctggaaagggagatctcccagtgcttatagacaaaatgaaaggcaaatacattctcattatttatgagaatattttaaagtatataaatatggattcctggaatcgaagccttctagataaatactgtgtagaatatggtgtgggtgtcattggattccacaaaactagtgagaagagtgtacagagctttcagttaaaaggtttccctttttccatatatggaaatcttgcagtaaaagattgttgtattaatcctcattctccattgattcgtgtgaccaaatcttccaagcttgaaaaaggttctttacctggaactgactggacagtttttcagattaatcattcagcctatcaaccagtaatatttgccaaagtaaagaccccagaaaacctttctccttccatctctaaaggtgctttttatgccactattatacatgacctggggcttcatgatggaattcaaagggttctttttggcaacaacttgaacttttggctgcacaagctcatcttcatagatgccatctccttcttatcagggaagaggctgacattgtccttggacaggtacattcttgtggatattgatgatatatttgtgggaaaagagggaacaagaatgaacaccaatgatgtaaaggtaaggctctattttctcaagtttcaaagttcagttcatcttccagcagggatacaactatcccagtttgtactacaactgggttacccaggacatgggatttactgggaaagtctgggcaatctaggattatcgctcaccctaaatcaactaagaagattatgtatttctatctgaatcaagaaaaataaagattttactaaaaaaaaaaaaaaaaaaaaaaaaaaaaaaa

SEQ ID NO: 2251 - DNA, 601 bp, Homo sapiens
  misc_feature (41)..(41): n equals a,t,g, or c
  misc_feature (70)..(70): n equals a,t,g, or c
  misc_feature (87)..(87): n equals a,t,g, or c
  misc_feature (138)..(138): n equals a,t,g, or c
  misc_feature (281)..(281): n equals a,t,g, or c
  misc_feature (596)..(596): n equals a,t,g, or c
ccaagtcaccccctttttttggccagcccttagcccactcntacatcccagctggtgcagaagctccggntgctttcttacaccccngcaattctctagtctaggactttgctgtgctttcttccacccctgcattcntccatggtcttaggaaattggcttgtgccctttccttccacttccaatgtcctccctccaatggctaagtcccaagtatgtatataagaatttagaggatacctcttctggatttatcccaggccccaattcagcccccagcnttccccatcaccttgaagctgagtctggctgaaattcctctattccctaccctttccagtcacaacacctaccacactgtttagcaagttcctccttctttttctgtctcagcagctagaccaggagctccctgcaggtcaagaccatgtgttctctgatgctttmtcatggcaaggggagacatagggttgcagtagtgagtgggcatytgttmtcagaaggcagtgcctggagcactataagtacttaataaactcttgtgaaattaaaaaaaaaaaaaaaaaaaaaaaaaaaaaaaaaaaaaaaaaaaaaanggggg

SEQ ID NO: 2252 - DNA, 1949 bp, Homo sapiens
gcgcacggtcggggcacagcagggccggtgggtgcagctggctcgcgcctcctctccggccgccgtctcctccggtccccggcgaaagccattgagacaccagctggacgtcacgcgccggagcatgtctgggagtcagagcgaggtggctccatccccgcagagtccgcggagccccgagatgggacgggacttgcggcccgggtcccgcgtgctcctgctcctgcttctgctcctgctggtgtacctgactcagccaggcaatggcaacgagggcagcgtcactggaagttgttattgtggtaaaagaatttcttccgactccccgccatcggttcagttcatgaatcgtctccggaaacacctgagagcttaccatcggtgtctatactacacgaggttccagctcctttcctggagcgtgtgtggaggcaacaaggacccatgggttcaggaattgatgagctgtcttgatctcaaagaatgtggacatgcttactcggggattgtggcccaccagaagcatttacttcctaccagccccccaacttctcaggcctcagagggggcatcttcagatatccacacccctgcccagatgctcctgtccaccttgcagtccactcagcgccccaccctcccagtaggatcactgtcctcggacaaagagctcactcgtcccaatgaaaccaccattcacactgcgggccacagtctggcagttgggcctgaggctggggagaaccagaagcagccggaaaaaaatgctggtcccacagccaggacatcagccacagtgccggtcctgtgcctcctggccatcatcttcatcctcaccgcagccctttcctatgtgctgtgcaagaggaggagggggcagtcaccgcagtcctctccagatctgccggttcattatatacctgtggcacctgactctaatacctgagccaagaatggaagcttgtgaggagacggactctatgttgcccaggctgttatggaactcctgagtcaagtgatcctcccaccttggcctctgaaggtgcgaggattataggcgtcacctaccacatccagcctacacgtatttgttaatatctaacataggactaaccagccactgccctctcttaggcccctcatttaaaaacggttatactataaaatctgcttttcacactgggtgataataacttggacaaattctatgtgtattttgttttgttttgctttgctttgttttgagacggagtctcgctctgtcatccaggctggagtgcagtggcatgatctcggctcactgcaacccccatctcccaggttcaagcgattctcctgcctcctcctaagtagctgggactacaggtgctcaccaccacacccggctaattttttgtatttttagtagagacggggtttcaccatgttgaccaggctggtctcgaactcctgacctggtgatctgcccacccaggcctcccaaagtgctgggattaaaggtgtgagccaccatgcctggccctatgtgtgttttttaactactaaaaattatttttgtaatgattgagtcttctttatggaaacaactggcctcagcccttgcgcccttactgtgattcctggcttcattttttgctgatggttccccctcgtcccaaatctctctcccagtacaccagttgttcctcccccacctcagccctctcctgcatcctcctgtacccgcaacgaaggcctgggctttcccaccctccctccttagcaggtgccgtgctgggacaccatacgggttggtttcacctcctcagtcccttgcctaccccagtgagagtctgatcttgtttttattgttattgcttttattattattgcttttattatcattaaaactctagttcttgttttgtctctcaaaaaaaaaaaaaaaaaaaaaaaaaaaaaaaaaaaaa

SEQ ID NO: 2253 - DNA, 1289 bp, Homo sapiens
  misc_feature (1130)..(1130): n equals a,t,g, or c
  misc_feature (1230)..(1230): n equals a,t,g, or c
  misc_feature (1271)..(1271): n equals a,t,g, or c
  misc_feature (1288)..(1289): n equals a,t,g, or c
ttacgccagctcgaaattaaccctcactaaagggaacaaaagctggagctccaccgcggtggcggccgctctagaactagtggatcccccgggctgcaggaattcggcacaggaaggatgaggaagaccaggctctgggggctgctgtggatgctctttgtctcagaactccgagctgcaactaaattaactgaggaaaagtatgaactgaaagaggggcagaccctggatgtgaaatgtgactacacgctagagaagtttgccagcagccagaaagcttggcagataataagggacggagagatgcccaagaccctggcatgcacagagaggccttcaaagaattcccatccagtccaagtggggaggatcatactagaagactaccatgatcatggtttactgcgcgtccgaatggtcaaccttcaagtggaagattctggactgtatcagtgtgtgatctaccagcctcccaaggagcctcacatgctgttcgatcgcatccgcttggtggtgaccaagggtttttcagggacccctggctccaatgagaattctacccagaatgtgtataagattcctcctaccaccactaaggccttgtgcccactctataccagccccagaactgtgacccaagctccacccaagtcaactgccgatgtctccactcctgactctgaaatcaaccttacaaatgtgacagatatcatcagggttccggtgttcaacattgtcattctcctggctggtggattcctgagtaagagcctggtcttctctgtcctgtttgctgtcacgctgaggtcatttgtaccctaggcccacgaacccacgagaatgtcctctgacttccagccacatccatctggcagttgtgccaagggaggagggaggaggtaaaaggcagggagttaataacatgaattaaatctgtaatcaccrgctaaaaaaaaaaaaaaaaaaaaaaaactcgagggggggcccggtacccaattcgccctatagtgagtcgtattacaattcactggccgtcgttttacaacgtcgtgactgggaaaaccctggcgttacccaacttaatcgccttgcagcacatccccctttcsccagctggcgtaatagcgaanaggcccgcaccgatcgcccttcccaacagttgcgcagcctgaatggcgaatggcaaattgtaagcgttaatattttgttaaaattcgcgttaaatttttnttaaatcagctcattttttacccaataggcccgaaatcggnaaaatcccttataaatnn

SEQ ID NO: 2254 - DNA, 278 bp, Homo sapiens
  misc_feature (2)..(2): n equals a,t,g, or c
  misc_feature (116)..(116): n equals a,t,g, or c
gngtccaaaattgtaattctcctggctggtggattcctgagtaagagcctggtcttctctgtcctgtttgctgtcacgctgaggtcatttgtaccctaggcccacgaacccacganaatgtcctctgacttccagccacatccatctggcagttgtgccaagggaggagggaggaggtaaaaggcagggagttaataacatgaattaaatctgtaatcaccrgctaaaaaaaaaaaaaaaaaaaaaaaaaaaaaaaaaaaaaaaaaaaaaaaaaaaac

SEQ ID NO: 2255 - DNA, 897 bp, Homo sapiens
ggcacgaggaaggatgaggaagaccaggctctgggggctgctgtggatgctctttgtctcagaactccgagctgcaactaaattaactgaggaaaagtatgaactgaaagaggggcagaccctggatgtgaaatgtgactacacgctagagaagtttgccagcagccagaaagcttggcagataataagggacggagagatgcccaagaccctggcatgcacagagaggccttcaaagaattcccatccagtccaagtggggaggatcatactagaagactaccatgatcatggtttactgcgcgtccgaatggtcaaccttcaagtggaagattctggactgtatcagtgtgtgatctaccagcctcccaaggagcctcacatgctgttcgatcgcatccgcttggtggtgaccaagggtttttcagggacccctggctccaatgagaattctacccagaatgtgtataagattcctcctaccaccactaaggccttgtgcccactctataccagccccagaactgtgacccaagctccacccaagtcaactgccgatgtctccactcctgactctgaaatcaaccttacaatgtgacagatatcatcagggttccggtgttcaacattgtcattctcctggctggtggattcctgagtaagagcctggtcttctctgtcctgtttgctgtcacgctgaggtcatttgtaccctaggcccacgaacccacgagaatgtcctctgacttccagccacatccatctggcagttgtgccaagggaggagggaggaggtaaaaggcagggagttaataacatgaattaaatctgtaatcaccggctattaaaaaaaaaaaaaaaaaaaaaaaaaaaaaaaaaaaaaaaaaaaaaaaaaaa

SEQ ID NO: 2256 - DNA, 2219 bp, Homo sapiens; identical to SEQ ID NO: 738
  misc_feature (2206)..(2206): n equals a,t,g, or c

SEQ ID NO: 2257 - DNA, 2547 bp, Homo sapiens
gcaggaatttttttttttttttttttttttttcactgttgagaaaaatttattatcaatgtctcagagccaacgacgacacgaacctacatgaacacaactcttaatttaggacccaagggtgactgtaaacatgataggagcgctgggacattgtcactgaggcagacagcagccactagtccacaatggtttaaaaagtcagtcctgtgccccctcactggaagcttccattctgggccatctgcagatattccttgtagagcttctcctgagcctcgaagagcttcttcagcttcttggcttgccctttgctgagctctttgccctccatgtcatgtgtgggcagaccatgcttacattttcatcaaacttggagtatttgtcggtttctgacaagaacatctcactggggggaatcttcatcttggccagctttgctgcttcttgttcctgtttcctccgggccgcctcctctttcttcttcctcttctcctcttcaacccgtctcttttcttctctctcttttaataaggtgtttctgtctaccagtttcaccactgtgggcagtccttcgtggtcttcaaaccgcaccccaagctcgggcaggatgttgtcccgcagggcatcgctgagctgcagaatctcagggactttttgctctcgggcaatcttccgcactccttctcggaattctgataacacctgaaggtagggcatgactgtggcctcgagactgaggctggttccaggccctccgaccgggaatcccagggagctgtcctcttctacggccccaaagatcttcagcatatgggtgaggtacagggcgatgttctccagcagagcctggttgggcctcttcctcacggctttccgggctgccatatagaggttgcactgactgaccaaggcccgcatctcttccatgacggtgcgggtgtcaacattgtcacagagggctttgtgaattgctgtcttcttgtcataaaagttcttattcagttctgcttcttcttctccccacttctcaaactgaccagtgatgtcaacaggagcgcgaaggatatctttcacatttaagaaaaactcattcaagaacttctcatattgaagcgctgactccatggtgttgctggagtagtccagggtgtccttccacgagtgcatgaggaaggccagccgcaactgccgtgctgagtgctttttcaaggcatctttaatggtgatgaagttttttagtgactttgacattttgcagcctgcaatggtcaggtggcctgtgtgcaggaagtacctgacccagcagtcgttttcaaagtaggcctccgactgtgccagctcattgtcatggtgggggaaccggaggtcgaacccacctccgtgaatgtccatcgaagcccctaggagggtgcctgccatggccgagcactcgatatgccagcccggacgaccctttccccaagggcacggccaggacggttctccgggcttagaggccttccataaggcaaagtcgttgggagagcgcttctcactcaggcggtctgcagagatgctcaggtcaccttccccttcttgaagggctttctgatctccaacggcctcaggcaccagcttcccataggagtgcttctcgctagaagcaaacttcgctgtatcaaagtagacagacccattggagacatagccgtaaccgttgtccacaatcttctggacaaagttcacaatttctggcacatactcactaacccgggttaagacatctggagggagaacattcagagcttccatgtctctgtggaagtccccctcccagaacttgggcagcttggagaagatggaattgtcagtgacatcacagccaagtgtagaatccagccagtcagagagcaaatccttggcttcttccagcaacacctccacacagctgttgacttcctctcccgtgagtctggactgcacagctttctcaagtggctctgtggcaagctgcactgcgtgctgaatccgttcgagcatctgctttttatcgggatccgtggtctcatttaattttactgaaaatggcttcagggcggcctgaacatcctccaagagctgtgccgcttcaggcctcttctcccgatactgctcgaacaggtggttctgccgggccctcttgatgatcttgtcatcaatatccgtaatgttcatgcaataaaagacatcaaatttgaagtaatccttcaacactcttctcaagatatcaaaagagatgtaggacctggcgtgccccatgtgagatgcgtcatagacggttggcccacagcaataccacgtcacctttttcccatcttgaggtatgaacacttccttgttcctggtgaggctgttgtaaaggtggagtctgcatggctgggtcccagcaggaggggaccactggggctgcacacgccggcctttgccctgctgcccggaggaatctgccatggctgggaatcccggacccgcagctgcggctacagacacttcctagaatctgatgcaaccgccgccccggaagtcg

SEQ ID NO: 2258 - DNA, 476 bp, Homo sapiens
  misc_feature (373)..(373): n equals a,t,g, or c
  misc_feature (439)..(439): n equals a,t,g, or c
ggcacagctgggttggctgtgaccgccccccgaccactggatggtcatggctgtagctcctgtacgagtagctggctgttggggtaaatgccacagagtccttttatgtgttcatgttttagttgcagtgccaaggtcatgtatagtcaacccttgaacaacctggraggtagarggtgtgaccctctgcacagttgaaaatccacacataacttttgattccccaaaaacttcaccactaaaatagcctcctgttgaccaatagcatgccagtcaatgaacacatattttgtatatacattacatactgtattcctaatgataaaggaagccagagaaaagaaaatattatgaagaaaatcataagggagangcaatatatttactattccattaagtggaagtggatcattataaaagtcacatccctggcctcctnccctttgaatttactgaagaagaaaaaggggggtctt

SEQ ID NO: 2259 - DNA, 481 bp, Homo sapiens
  misc_feature (7)..(7): n equals a,t,g, or c
  misc_feature (66)..(66): n equals a,t,g, or c
  misc_feature (101)..(101): n equals a,t,g, or c
  misc_feature (472)..(472): n equals a,t,g, or c
gagcatntgctttttatcgggatccgtggtttcatttaattttactgaaaatggttcagggcggcntgaacatcctccaagagctgtgccgtttcaggctnttctcccgatactgctcgaacaggtggttctgccgggccytcttgatgatcttgtcatcaatatccgtaatgttcatgcaataaaagacatcaaatttgaagtaatccttcaacactcttctcaagatatcaaaagagatgtaggacctaaagcaatgaaaaaacaaacatttccacaccagacgatatgtatagcttaacctccaacaacacgtgtttgaactgcatgagtgcatttatatatgattttctctgccatccctgaaacagcaagacccccccttctcctcctcagtctactcaacgtgaagatggcaaggatgatgacctttataatgatccacttccacctaatgaatagtaaatatatngcctgtccc

SEQ ID NO: 2260 - DNA, 1843 bp, Homo sapiens
  misc_feature (431)..(431): n equals a,t,g, or c
aaaaatccgaaaccgagcgaaaaaaaacctgcgagtgggcctggcggatgggattattaaagcttcgccggagccgcggctcgccctcccactccgccagcctccgggagaggagccgcacccggccggcccggccccagccccatggacctccgagcaggggactcgtgggggatgttagcgtgcctgtgcacggtgctctggcacctccctgcagtgccagctctcaatcgcacaggggacccagggcctggcccctccatccagaaaacctatgacctcacccgctacctggagcaccaactccgcagcttggctgggacctatctgaactacctgggcccccctttcaacgagccagacttcaaccctccccgcctgggggcagagactctgcccagggccactgttgacttggaggtgtggcgaancctcaatgacaaactgcggctgacccagaactacgaggcctacagccaccttctgtgttacttgcgtggcctcaaccgtcaggctgccactgctgagctgcgccgcagcctggcccacttctgcaccagcctccagggcctgctgggcagcattgcgggcgtcatggcagctctgggctacccactgccccagccgctgcctgggactgaacccacttggactcctggccctgcccacagtgacttcctccagaagatggacgacttctggctgctgaaggagctgcagacctggctgtggcgctcggccaaggacttcaaccggctcaagaagaagatgcagcctccagcagctgcagtcaccctgcacctgggggctcatggcttctgacttctgaccttctcctcttcgctcccccttcaaaccctgctcccactttgtgagagccagccctgtatgccaacacctgttgagccaggagacagaagctgtgagcctctggccctttcctggaccggctgggcgtgtgatgcgatcagccctgtctcctccccacctcccaaaggtctaccgagctggggaggaggtacagtaggccctgtcctgtcctgtttctacaggaagtcatgctcgagggagtgtgaagtggttcaggttggtgcagaggcgctcatggcctcctgcttcttgcctaccacttggccagtgcccacccagcccctcaggtggcacatctggagggcaggggttgaggggccaccaccacacatgcctttctggggtgaagccctttggctgccccactctccttggatgggtgttgctcccttatccccaaatcactctatacatccaattcaggaaacaaacatggtggcaattctacacaaaaagagatgagattaacagtgcagggttggggtctgcattggaggtgccctataaaccagaagagaaaatactgaaagcacaggggcagggacagaccagaccagacccaggagtctccaaagcacagagtggcaaacaaaacccgagctgagcatcaggaccttgcctcgaattgtcttccagtattacggtgcctcttctctgccccctttcccagggtatctgtgggttgccaggctggggagggcaaccatagccacaccacaggatttcctgaaagtttacaatgcagtagcattttggggtgtagggtggcagctccccaaggccctgccccccagccccacccactcatgactctaagtgtgttgtattaatatttatttatttggagatgttatttattagatgatatttattgcagaatttctattcttgtattaacaaataaaatgcttgccccagaaaaaaaaaaaaaaaaaaaaaaaaaaaaaaaaaaaaaaaaaaaaaaaaaaaaaaa

SEQ ID NO: 2261 - DNA, 2624 bp, Homo sapiens; identical to SEQ ID NO: 368
  misc_feature (2508)..(2508): n equals a,t,g, or c
  misc_feature (2518)..(2518): n equals a,t,g, or c
  misc_feature (2596)..(2596): n equals a,t,g, or c
  misc_feature (2619)..(2619): n equals a,t,g, or c

SEQ ID NO: 2262 - DNA, 1055 bp, Homo sapiens
gcggacgcgtggggtttggggaaggctcctggcccccacagccctcttcggagcctgagcccggctctcctcactcacctcaacccccaggcggcccctccacagggcccctctcctgcctggacggctctgctggtctccccgtcccctggagaagaacaaggccatgggtcggcccctgctgctgcccctactgcccctgctgctgccgccagcatttctgcagcctagtggctccacaggatctggtccaagctacctttatggggtcactcaaccaaaacacctctcagcctccatgggtggctctgtggaaatccccttctccttctattacccctgggagttagccayagytcccracgtgagaatatcctggagacggggccacttccacgggcagtccttctacagcacaaggccgccttccattcacaaggattatgtgaaccggctctttctgaactggacagagggtcagragagcggcttcctcaggatctcaaacctgcggaaggaggaccagtctgtgtatttctgccgagtcgagctggacacccggagatcagggaggcagcarttgcagtccatcaaggggaccaaactcaccatcacccaggctgtcacaaccaccaccacctggaggcccagcagcacaaccaccatagccsgcctcagggtcacagaaagcaaagggcactcagaatcatggcacctaagtctggacactgccatcagggttgcattggctgtcgctgtgctcaaaactgtcattttgggactgctgtgcctcctcctcctgtggtggaggagaaggaaaggggaaggatggtttgtattctacaggtgaagtatgatcacatcaaggttgtttgactccagggcaggatttatgatacgtacctgctcttacacaagaacgatagatcaactggaaatcttagaggccttcccagaactggggttaatcagaagctgccatggcagattagcttccaagatggagttgccttagcctccacaatattaaaagtagaactaccataaaaaaaaaa

SEQ ID NO: 2263 - DNA, 1214 bp, Homo sapiens; identical to SEQ ID NO: 746

SEQ ID NO: 2264 - DNA, 449 bp, Homo sapiens
  misc_feature (331)..(331): n equals a,t,g, or c
gaattcggcacgagtctacatatattttgtgaattcatgccatacttaacattttctttttttaaatatttctgtgctatgcagtttatctgcaactttttttcaaattyttccaaatctccaaaaaatgtktccatatatttatycaaaaaatctgcatgtagttgaacccatggrgtttatttacatggtgctggtcacaggtctactgtatttccttgaggtttgttgagcttccctccaaaataattacttttaaatttatttatccaggcggtttatacatctcccatttccttttggaagtccagcttattgggaaaattaatgngttcccttcccagtgggggttttaatatttcccctagggtttttttccaagtttcccccggttacccttaaaatgaaagttccggggccattttggggaaatttagaaacttaatttg

SEQ ID NO: 2265 - DNA, 655 bp, Homo sapiens
  misc_feature (11)..(11): n equals a,t,g, or c
  misc_feature (80)..(80): n equals a,t,g, or c
  misc_feature (169)..(169): n equals a,t,g, or c
atatattttgnggaattcaatgccatacttaacattttctttttttaaatatttctgtgctaatgcagtttatctgcaantttttttcaaatttttccaaatctccaaaaaatgtttccatatatttattcaaaaaatctgcatgtagttgaacccatggagtttattnacatggtgctggtcacaggtctactgtattttcttgaggtttgttgagcttcctcaaaataattactttaaattmtttatcaggcggtttatacatctccatttctttggagtcagctattgggagattattgtgttctttcagtggtgttaatatttcctaggtttttttcatgtttcctgttaccttacattgatgtctgtgcattttgtgaagtaggaacttatttgaatttttgcagactggttttgtctaggaaagcccttaagcagtgagacagtccagagattaagggaaggttatctggcatggtccatgggatggactgctgctggagtcatcaggcaggctggcctagttcctgagtcagcaggtgtgtgggcctgggacctggttacatggggttggacctggagcctggatctactggggtgggtctgttgtttgggtttgtgggattgggcctcgaggggggcccgtacccaa

SEQ ID NO: 2266 - DNA, 337 bp, Homo sapiens
  misc_feature (173)..(173): n equals a,t,g, or c
  misc_feature (334)..(334): n equals a,t,g, or c
gagcagatgtcccccacaccctccggtcccaggtgttgtttgatattccttggcattgacggaaatgtcacccgttttccccttccaccggcatgtgcatgggaccccacccttcgtttcgccgtcgccccgtttgcctccggtgtcacacgttaacaccaactgctgtgggnattggccagtgycacgcgtggtcacatggtctccccctggattyggctcttttccttttgcagttgtcctgttaagcacggtcggtttttcggaaccctggggttttaaaagtgggggtagggcacagttttttcaaaggaggagggagggcaaaggttgntgg

SEQ ID NO: 2267 - DNA, 725 bp, Homo sapiens
ggcacgagcacgcttgagacatgcctcacctcgagaccccagtggatgtcaaatgttatccttgttgcacagaggaggaaactgaggcttagattaagcaacctgcccaaggacctccggccggttccactgttagagttcatgcccttcaccctagtatgggcctgcgtgtatggacagaggggcagacagggaggctcacctcaaactccaggtaggcctccttctgccgctgctcttcagcctccttgccccggcccttcttgcccagctgggcggcccggtgctcccgcagctcacttgccatggccttcagcttggcctcgtgggtccgcacctgctcctcctagcggccagggggaggcatggtcatggtcactctgccctatacagtgcctctgcagatttttaaaaagataccccttccagccgggcgcagtggctcacgcctgtaatcccagcactttgggaggccaaggcgggcggatcacgaggtcaggagatcgagaccatcctggctaacacggtgaaaccccgtctctactaaaaatataaaaaattagccaggcgtggtggcaggtgcctgtagtcccagctactcaggaggctggggcaggagaacggcgtgaacccgggaggcagagcttgcagtgagctgagatcgtgccacggcactcccacctgggcaacagagcgagactccatctcaaaaaaaaaaaaaaaaa

SEQ ID NO: 2268 - DNA, 470 bp, Homo sapiens
ggcacgagctcgtgccgaattcggcacgagatcaagattccatcatcgcaactccagaaatcgctctatgttttacatcgaaactaccaaagttcacgaggctaattccacaaagcaaatttctctgctttacgtagtgcagctggtagtatttggagaacttggaagttcttttacttcctctgtccttcccgtagctttctgcacctttggagatctctttctgtcctattcttctgtctccagtcatcagagggcaactccagtgcacttgaagtcctagagtatcttggggggattttttcagctttcctctcatgctcagcatttgtagagcagctcctgtgcatttcgtgaagccctggcatactttgagggattctctcagctattctgccctgctcctgatttgtactgggccatgtccctgcacttggcaaaggccctgcacacctcgagggggggcccgg

SEQ ID NO: 2269 - DNA, 635 bp, Homo sapiens
  misc_feature (538)..(538): n equals a,t,g, or c
  misc_feature (575)..(575): n equals a,t,g, or c
  misc_feature (604)..(604): n equals a,t,g, or c
ggcacgagcagtggtacagccgtgctctggggagggcagcagccgtgcctgtgagcacatctgcacctgctggaggaccaggatacatgaggctgccacatgtgcatcccatgctgccccctccaccctttcaacgaggcagctgtgtccagttggtgccttttagtcaggggaattgagactctgagagtgggatggggaagagacaagatcttgaacatgccaacggcatgcttgggcagaaactggttgcctgcacttttgtgctgtgcstcacttttcccaagcatgcatggccttgtgtgcccctgtgtactcttcttcagatctcatctgggaggcccagaatctccacacctgcccatgcagtctcctgtggccattgtgtgatggaggacacaccttggcccccttgtgcagggmagaatccgaacccccatatatgacagtcctgagaatgcaggtggttgaggggagcggtagatctaagtaccccacgtgctggaggcttgccaaggttgtcttgatgcctgctcanaccctcgggatatgagcatattgggtttctatattanactaaattcccgtttgattaactaaaaanggaaaacgggggcatctgatgcttgactggc

SEQ ID NO: 2270 - DNA, 446 bp, Homo sapiens
  misc_feature (406)..(406): n equals a,t,g, or c
  misc_feature (431)..(431): n equals a,t,g, or c
  misc_feature (436)..(436): n equals a,t,g, or c
gaaacaaacaaacaacagacttctgaggcccaggtggatggattttcctgccaaaagcacccagcttgtagagatttgagtgacccagtgacttccttgttccagtgctggtggtggctttttgactgggacagcagactgaggacagtgatcatggagttcccgacaagtgtgagaccgcatgttgtgaggatactttgcctgttaaatgtattggagcctggggagaatggggtgttaagccgtgaccgtcttttcccatggagcagtgagcacccatcacctccaagcccagagagaccaagcgagaaagtgggagaggaaagtgtatcgaacaagcgctttctccctcaggtctcaagttcttccctgaccccaacttgttcatacattttcgagggggggntccggtattccattcgtcccttatnagtgnattcgtatta

SEQ ID NO: 2271 - DNA, 1164 bp, Homo sapiens
ctggccagtgtctggacgatcccacagggctttggagaacagattggagacttttcaagccacctgtgagagggatgtcatatggcagagaatgtggcatgtgtgcctcactacagagctgcactcattgtcgcagtggcttgcccagagtcagggaagwagatctagtttcccatgtccacagaattctttcattcaaccaccttcctattcctgggcacagttgacctagggcttcagcatcgtctttacagagacacggagctctttttctgaatakaaagcgataaagactagtttactatcaagggaatgcaggggactgtgctttgtcaccactgtctcattctatcattttgcaatttaatgatttttacggttggctctgaaatgcattacacactgcagaaactttctctcagagggaagagggagatttgccatggcaaaggacaaatcatatgctgtgtaaaccttaaaatactatacacaggagctaaattttcaggctttaaaatttccagatgaattcaattaaaagtaatcaccacacaccctatactttcctttcttcaaatgctggaatgtgtattaatatgtatggtaacccaaggaggctcacagaaagttacagagagtaacactatatgcctgtctagaaattgcacgcagtatgtgcaaggccctggtctgtttttacactcaaatgtgaaaggggaaaaggacaccgcagcttgttattgcacctgagcacatcggctgatggggatgtggtctgacgtctttgktgtgaggcttttgtgctgcacttgccgcctgccccacttcacaggtcagtggcagacgcactgatgctgtgctgcttttgtgctgggggtgargaggaaagcagcatgtagaagctagagcatgggcaagccattgtgcattaataggacacttttatttatggaactgtgtccccacataggaagagtctggcccaattagccaaggcacccttttgatggcacacatcctctttaaaatccaactcgcagctacaaggcttagcatgtcctgcatgtgttgtctttccggtttcacattagaatttgatgttaaaaagtgagytggtttgtatctaggtgaacacacctagtttgaagctgtaagttcaatcat

SEQ ID NO: 2272 - DNA, 767 bp, Homo sapiens
  misc_feature (753)..(753): n equals a,t,g, or c
aaatgcatgctctcactacttctatttagtatagtactgggaccagcaacagcaatcagacaagagaaagaagtaaaaggcatccaaacaggagaggaagaaataaaattatccctggttgcatatgacatagtcctatatatagaaaaacagactctaccaaaatatagcaaatacataagaaacaaaggaacaaaaggctgttagaactaataagtaaatttaataagattgcaggatataaagtcaatcagttgccttctttataccagtaaaaatctacacaaaaacaaaatcaagaaaatgatctcatttacagtagcataaaatatagctaagcatagtggcatttacccgtaatcccagctactgcagaggctcaagtggtaggatcgcttgagccggagagattgaggctacagtgagacattatcgcactattgcactccagcctggatgacaaagcaagaccctgtctcaagcaaacaaatgaataaataaacaaagggcacaagatctgaataatcacttctccaaaaaagaaataagaagccaacaggtatatgaaaaagtgctcagcatcgctaatcatcaggraaatgtatatcaaaaccacaacaacataataccccacatctgttatgatagctattattggaaagrcaccaaattaccaagtgttggttaaggtgtagagaaaagrggaccccttgcacactgttggtggggatatwtaaatgkttatttaaaaanttaaaaattggaat

SEQ ID NO: 2273 - DNA, 1145 bp, Homo sapiens
acccttcctgatcaggaaaatgtatatcaaaaccacaacaacataatacyyyacwtctgttatgatagctattattgarragacacaaaataacaagtgttggttagggtgtagagaaaagagaacccttgcacactgttggtgggaatatataaatgtttattaaaaattaaaaatagaattgccatgtgacacagtgatctctctcttgagtatatactcattggaaatgaaatcagcccttcatacaaatatctgggctctcattttcactgaagcattattcacaataccaaagatatggaaacaacctaagtgtccatggatggataaatgaattctaarctttggtactattccgcctttaagamggaagtcctgccattttcatggcaatatagatgaacctggaggacattatgctgagtgaaataaaccagacacagaaataaaaatatttgattatcccacttaacatattgaatcttaaaataaaaagtcaaatacatagaaattgagagtagacagtagttaccaggggtaggggttggagagaaatctggagtcatatgtcagggtacaaagttgcaattatgtaggataaataagtctagagatataacctatgccatgatagctatggataatagkattatataacatactggaaatttacaaagagaaatttcaggcattcttgktacaaaaaaaagattaaataaagatctacctatgtaaggagatagatatattaatttacttgactatagtaatcacttcacaatgcttatatatatcaaaacatcatttataccttaaatatttacaattttaaaattaaggaagtaacaattcaaaaaaacaaggcacagttatcattgggagacaaagatatgctttttaattgattctgatctcatacaagcaaaatgggaagttaaattttgattttgaacctgttttctgttttaagttgcattccattttgtttatatttgaatgaatgcattgctttgttttattctgagtaattattataagatagagagtagaaaaacaataaaaaataacaatgtaacttaagagtatttgaaaagaaacaaaatcaacaaacttgctagactaaaaagagacagaaggctcga

SEQ ID NO: 2274 - DNA, 495 bp, Homo sapiens
  misc_feature (38)..(38): n equals a,t,g, or c
  misc_feature (44)..(44): n equals a,t,g, or c
  misc_feature (90)..(90): n equals a,t,g, or c
gatccaaattgcaatcagcccagcctctgggctcaggncattcntctaccccagaactatttttggtgtgtgttcatagacagcacaccnccaagtattggtatttgagatgcaagcactaaggatgattaaagttagttgctaatgagcatgcctagaatagatatactctgtgtgtatgcgtgtgtgtgtgcgcgcgctccatgtgtgtgctctgttgcgtgtctacaaagcagatgtctacacacctgcccttaggtgacctcaccaatgtccatgaactggtgctgctagatcagctaagaggtccctggacggaagacggaaatggataacaattgacctgtctcaaaatactgccttactgggtacccatgctcccccatcagaatccaatctacctttcaacgtctagctcagcccatcttaccaggaagcctcacttgaccaccttctgaacttagaccaaggctagaaaatatgttttatctcgag

SEQ ID NO: 2275 - DNA, 2085 bp, Homo sapiens; identical to SEQ ID NO: 306
  misc_feature (2062)..(2062): n equals a,t,g, or c
  misc_feature (2065)..(2065): n equals a,t,g, or c
  misc_feature (2084)..(2084): n equals a,t,g, or c

SEQ ID NO: 2276 - DNA, 607 bp, Homo sapiens
  misc_feature (8)..(8): n equals a,t,g, or c
  misc_feature (14)..(15): n equals a,t,g, or c
  misc_feature (22)..(22): n equals a,t,g, or c
  misc_feature (594)..(594): n equals a,t,g, or c
aacttttntctggnncgccccngagatgggtttcctgaatacagcacactgatgggtcttgactctttatccaatttgccagtctgtgtcttttaattggagcatttagtccatttacatttgaagttaatattgttatgtgtgtatttgatcctatcattatgatgttattttgctgattagttgacgcagtttcttcctagtctcgatggtctttacaatttggcatgtttttgtagtggctggtactggttattcctttccatgtttagcgcttccttcaggagctcttttagggcagtcctggtggtgtcagaatctctcatcatttgcttgtctgtaaagtattttatttctccttcatttatgaagcttagtttatctggatacgaaattctgggttgaaaattcttttctttaggaatgttgaatattggcccccactctcttctggcttgtagagtttctgccaagagatctgctgttaagtctgatgggcttccctttgtgggtaacccgacctttctctctggctgccttaacattttttccttcatttcaactttggtgaatctgacaattatgtgtcttggnggtgctcttctcg

SEQ ID NO: 2277 - DNA, 933 bp, Homo sapiens
  misc_feature (7)..(7): n equals a,t,g, or c
  misc_feature (13)..(13): n equals a,t,g, or c
  misc_feature (19)..(19): n equals a,t,g, or c
  misc_feature (48)..(49): n equals a,t,g, or c
  misc_feature (926)..(926): n equals a,t,g, or c
aggtctncttccncggggnactaaggggggacttaacgggaaagactnncggagagtttccccatctggctcaccactacccccactacccccactatccccacagacgatgccctgtcccttgcctcatgctccggcagggtacaggctcgcacctggggcctcaaggagcatctctcttagacctctgtgtcctggtcattgaatgggcacttgagtcacccagggccattggaacaaagaggaagaatcaggccccacgatgttttgggagagtgtttagcacaggaaaatgcgcagaatacatgcacgacacgggggcactgtcagtgtgggagcaatggtttacaacctccagccctaatctgagcactctcacctgtgcaatctgaaaggaacaggagacttgcaggaaagacagtgcctggatttaacttaaaggaactaaaaatgttggaatttttactcttgatatccttccaaatcaactctctcaatgttcccatcctcaaaactatcatatggggtaactgaggcagtcagagatttactgactcaatgtcactcaattgattctgagttcactgctgattacatccgaccaaactgctttttctgaagtctactccgtttatcatgctggtgatgattttgtgcggctctgggacaaactccacctggctgargataaagcaaatctgcggtgacttagtcctcctgtcatttcccatcagttccccactctcctcctctgcccctccacagtctcccatgcaggctgacaccatatgacggccttaatggagtccaccgagtatttcaggttctctcctgggccacttgaaagtggatgtacccatgggatttgctttgacccaggagatgtgagtggaagtgaagygtgtcacctcgaggcaagagttggnagccatt

SEQ ID NO: 2278 - DNA, 1081 bp, Homo sapiens
  misc_feature (92)..(92): n equals a,t,g, or c
accacgacaagatcgtgggtgatcataatgatggcggtattaaattcccgcttcagttcatttaatagcgtcatgatctgcgcctgtacggngacgtccagcgcagttgttggttcatccgcaatcagcagcttaggtcgacataacaaggccatcgcaatcatgactcgctgacgcatgccgccagaattcatgccacggtgtacgtacctggtcaggtttgaccagtggcatggcgtttaacaccgcctgacgtcgccagttaaatagtcgcatccttacttgtacctgatagccgggttaatggcggcgtaaagcacatccaccactaagttgataagaataaattccagcgagaaaagcagaatttccgcctgaatcaccgggtaatcacgcatttctacggagtcaacgagtaagcgtccaagtcccggccagttgaaaactttctccacaacgatggaaccaccgagcaaaaagccaaactgtaagcccatcatggtcactaccgggatcatcgcgttacgtagcccgtgtttgaggacaacccaggtttcgctcacccctttcgccctcgcggtacgcatataatcttcgcttaaaacatcgacaaacgacgcgcgggtaaagcgcgccatcacggcggccactgccgcgccgagcgtcagggagggtaaaatgtagtgctgccaactgtctgctcccacggtaggcagccagcccagttcaacggagaatacctgaattaaaagcatccccagagcaaatgccggaaacgagatccccgacaccgcaatggtcatactcaatcgatccggccaacggttacgccagacggcggcgataattcccgccgccataccaaatataaccgcccagaccatactggttatggtcagccacagcgttggcataaagcggctggcaatctcatcggcaaccggacgacgcgacaccatcgacaggccaaaatccccctgcacagcattgctgatatagtgccagaactggtgatacagcggctgatccaaccccagctgctgacgcaccagttctataacctgcgcatcagcttccggcc

SEQ ID NO: 2279 - DNA, 656 bp, Homo sapiens
gacgctcggcgcggcagtggccgccgtgatggcgcgctttacccgcgcgtcgtttgtcgatgttttaagcgaagattatatgcgtaccgcgagggcgaaaggggtgagcgccatcacgaaggaaagcgcccgcaggggcgcttgtccattaccgcatacaaagtcgcgataatcttactcatcagatgtcttcttgaccggctttgcctgattcgacgtgttcaagcgccagcgcggtgattaccccaaacgaacaggcaagaagcgttcccagaatccatgcgaaataccacatttttagctccttacttagtacagagagtgggtgttacgttcaatatcttctttggtgatacgaccgaacattttccagtaacaccaggcggtgtagagcagaatgatcggtaccagaaccaccgcaacccaggtcatgacgttaagcgtcactggctggaagttgcatcccacattgtcagacttgcgttcatcatggtgctggacggcatcacaaacgggaacattgcgataccggctgtcaggatgatgcaggccagcgtcagggaggagaacacaaacgcccacgcggctttatccatacgtgcagtcaggatggtcagcagcggcagaaccacacccagtgccggaatagcccacag

SEQ ID NO: 2280 - DNA, 445 bp, Homo sapiens
  misc_feature (41)..(41): n equals a,t,g, or c
  misc_feature (59)..(59): n equals a,t,g, or c
  misc_feature (92)..(92): n equals a,t,g, or c
  misc_feature (94)..(94): n equals a,t,g, or c
ctcaagattgctgtgctagcaatgagagagactcccgtggncgtaggacactctgagcnatgtgtgggatataatctcctggtatgccattncntaagcccattggaaaagtccagtatttgggtgcgagtggcccagttttccaggtgccgtctgtcacccctttccttgaccaggaaagggaagtccctgactccttgtgcttcctgagtgaggcaatgccttgccctgcttcagctgttgcacagtgcgctgcacccactgtctggcactccctagtaagatgaacccggtacctcagatggaaatgcagaaatcacctgtcttctgcatggctcacactgggagctgtagaccggagctgttcctattmggccatcttggctcctctgaaactgaaactcttataggcaaataacatgtctataagtaaattagtttcttg

SEQ ID NO: 2281 - DNA, 1560 bp, Homo sapiens
  misc_feature (1044)..(1044): n equals a,t,g, or c
caaattatcccctgagataatataccataaggagggaagctataggtgggargtatgcttttcttttataaaatggggaaaaaaaactacttaaagaagaatggggctgggaaaggaaaatccagtagataaaactgcaggtgcatttctggctgatttttaagaaataatatactgtatgtggaagccgatattagatcgggaaaattcagtttttaaaaagtttctatgcccacatttccctctggagtaattattttgaattcccaagtgtcagcagcccctcctggaagacctagaaaataactcttccatatatcttgatagaatattgatgaatgggamcaacttgaaaaagaaaaccactttctagctctccatccttttctaggtgaagagtgctgtgtctgaacaagagcaatgtcagtcagagtgtgctgtagtggaaagaccctaggttttaggggctggtattgttactcattagttactaagctgccagttttgtcatcagtgaaattgagacaatctattaatatgttatagagttgctataaagagtcagtgaataatataaagtacttggaccgtaaaacacatagtaagtgctccataaacaatattttaaaacatgtaaatacgtgtgcagtatttactttgttaagagataaacttaggattgggcggggggtgggggaggagccaagatggcggaataggaacagctctggtctacagctcccagcctgagcaacgcagaagacgggtgatttctgcatttccatctgaggtaccgggttcatctcactagggagtgccagacagtgggcgcaggtcagtgggtgcacgcaccatgcacgagccaaagcagcgcaaggcattgcctcactcgggaagcgcaaggggtcagggagttccctttcctaatcaaagaaagggatgacggacggcacctggaaaatcgggaaaatcgggtcactcccacctgaatactgcgcttttccgacgggcttaaaaaayggcgcaccacragattatatcccncacctggctcagagggtcctacgcccacggartctcgctgattgctagcacagcagtctgagatcaaactgcaaggcggcagcgaggctgggggaggggcgcccgccattgcccaggcttgcttaggtaaacaaagcagccgggaagctcsaactgggtggagcccaccacagctcaaggaggcctgcctgcctctgtaggctccacctctgggggcagggcacagacaaacaaaaagacagcagtaacctctgcagacttaaatgtccctgtctgacagctttgaagagagcagtggttctcccagcacgcagctggagatctgagaacgggcagactgcctcctcaagtgggtccctgacccctgacccccgagcagcctaactgggaggcaccccccagyaggggcagactgacacctcacayggccgggtactcctctgagacaaaacttccagaggaacgatcagacagcagcatttcggsgwttcaygaaaawccmttttctgcagccat

SEQ ID NO: 2282 - DNA, 1765 bp, Homo sapiens
ttttttttttttttttttttgtggagaggggatcttggtatatattccaggctggtcttgaactcttggccttcagggatcctcccccgccttggcctcccaaagttctgggattacaagtgtgagccactgcacccagcctgaaagtttatttcttaatgagaattgtgtctcaagcaatatttcaaattatcccctgagataatataccataaggagggaagctataggtgggaggtatgcttttcttttataaaatggggaaaaaaaactacttaaagaagaatggggctgggaaaggaaaatccagtagataaaactgcaggtgcatttctggctgatttttaagaaataatatactgtatgtggaagccgatattagatcgggaaaattcagtttttaaaaagtttctatgcccacatttcccctctggagtaatttattttgaattcccaagtgtcagcagccccttctggaagacctagaaaataactcttccatatatcttgatagaatattgatgaatgggaacaacttgaaaaagaaaaccactttctagctctccatccttttctaggtgaagagtgctgtgtctgaacaagagcaatgtcagtcagagtgtgctgtagtggaaagaccctaggttttaggggctggtattgttactcattagttactaagctgccagttttgtcatcagtgaaattgagacaatctattaatatgttatagagttgctataaagagtcagtgaataatataaagtacttggaccgtaaaacacatagtaagtgctccataaacaatattttaaaacatgtaaatacgtgtgcagtatttactttgttaagagataaacttaggattgggcggggggtgggggaggagccaagatggcggaataggaacagctctggtctacagctcccagcctgagcaacgcagaagacgggtgatttctgcatttccatctgaggtaccgggttcatctcactagggagtgccagacagtgggcgcaggtcagtgggtgcacgcaccatgcacgagccaaagcagcgcaaggcattgcctcactcgggaagcgcaaggggtcagggagttccctttcctaatcaaagaaagggatgacggacggcacctggaaaatcgggaaaatcgggtcactcccacctgaatactgcgcttttccgacgggcttaaaaaatggcgcaccacaagattatatcccccacctggctcagagggtcctacgcccacggagtctcgctgattgctagcacagcagtctgagatcaaactgcaaggcggcagcgagactgggggaggggcgcccgccattgcccaggcttgcttaggtaaacaaagcagccgggaagctcgaactgggtggagcccaccacagctcaaggaggcctgcctgcctctgtaggctccacctctgggggcagggcacagacaaacaaaaagacagcagtaacctctgcagacttaaatgcccctgtctgacagctttgaagagagcagtggttctcccagcatgcagctggagatctgagaacgggcagactgcctcctcaagtgggtccctgacccctgacccgcgagcagcctaactgggaggcaccctccagcaggggcacactgacacctgacattgcagggtactccaacagacctgcagctgagggtcctgtctgttagaaggacaactaacaaacagaaaggacatccacaccaaaaacccatctacctcgtgccgaatt

SEQ ID NO: 2283 - DNA, 298 bp, Homo sapiens
cacgttgtagaaatggctgggggcgaaaatgctgataataaaacgtagcgtggcgatcatcgcgatactgttcagtccgttaagtacggcgagcaatctcacatcgcaattgcacaacttttttagcgcccaactcgcgggggtaagtgatgaggttcgtgtttctattcgtacagcgcccaatctactaccgccatgcgagcagccattgctttcgatgagcaataattcccgcctgtggggcaatgtgaatgtgttggcacgctgcggtaacgagggggggcccggtgacccaatt

SEQ ID NO: 2284 - DNA, 1095 bp, Homo sapiens
  misc_feature (1087)..(1087): n equals a,t,g, or c
  misc_feature (1093)..(1093): n equals a,t,g, or c
gactacgccagctcgaaattaaccctcactaaagggaacaaaagctggagctccaccgcggtggcggccgctctagaactagtggatcccccgggctgcaggaattcggcacgagctgcaccaaccaaactcagaaacacaagcacattctcaggccccagagcaattatgtgcccaggccctartgcatggttttttgtggggcttttaagggttgttttgtttgtttgtttgtttgtttgtttgttttgcaggggtagaaggtggaagaaaaaaaccttctacacaggttcaaggtgcagagagagatgtcatggagggccagcgctcagccgcagtgcctcaggtgtacctggctccatgcaggttctccagccacacttctgctgctgcttgtgggcctcatctcatctgtgttcctcctacatgtcattatcagtgagcagctcacggcagcatagcgggaggaatttgtcttgcttaaccagggaaggttcagttgcgttggaagaggggatggcaaggcatctccatgtcagtctcctcctcaaggctcaaaagacacatggggcacttgagctgtgcaggaatcccatggctaatgccagcatcatactgtggcagaaactaagtggtatctgcaagaagagagaaagccttgacttcacaagtgggagaaatctctcgtggagtgactaatgttggcattaagtttgccttcagagggtgggtcatgtatacagcctcttctttcaaagtgggggcttaggatatttctatcatcttatgatatttagaagtttaagcttgattcaatcataccacaatgtatacatatatcgaaacatcacattgtaccccttaaatgtatacaactatgatttgtcaattaaaaaattaaaaatttttagaaaacatagaatctcagacgtgactagatctatttgtttcacgcatgtattccctttagagtgtatttcatcttctcagtaattctgtggcatgcttcctcaggacatgggcagtaacagcccccaaacccccaaaaaaaaaaaaaaaaaactcgagggggggcccgtacccaatngccaanta

SEQ ID NO: 2285 - DNA, 1170 bp, Homo sapiens
gcgtcgcttcagcgttctcgggtgctacgctgctgcagctgycgcctcttccaggcgcaccaggtaaaaaagagtgtcaagtggacatgcaaagcttgtggagagaagcagtcctttttgcgggcttatggtgaaggctctggtgctgattgtagacgccatgtccaaaagttaaatctactacagggacaagtttcagagctgccactcaggtctctagaagaaactgtcagtgccagtgaagaagaaaacgtgggacaccagcaggctgggaatgtgaagcagcaggaaaaatcgcagccctcagagagtcgctggctgaagtatctagaaaaggactcccaagaactggagctggaaggaacaggagtgtgtttcagcaaacagccttcatccaaaatggaggagccaggcccccgcttcagtcaagacctgcctagaaaaaggaagtggagcgggmgcaccgtccagcctccgtgcagccgtgcgtgcaggactcgggtggctctgaggtcgcctggggacccagawgggacaggctggcctgacatggaaggtgaaacaaggcagcagcccctgcctccaggagaactctgcagactgcagtgccggggagctgaggggtcctgggaaggagctatggagtcccatccagcaggttacagccacatcctctaaatgggcgcratttgtcctgccacctagaaaaagttcacatgtggacagtgagcagccaaggtctcttcagagggaccccaggccagctggtccagcacaggctaagcaagggacccccagagcacaggcctcaagagaaggcctcagcaggcccactgccgctgtccagcttcctcgggccacacaccccgtcacatctgggtctgagaggccttgcgggaagacctcatgggacgcaaggactccctgggcagagggtgggcccctggtcctggaggcacagaatcctcgacccacacgactatgtgacctctttataactggggaagacttcgatgatgatgtgtgatctgggactggcaggttattaatcgagatacacttgttaggagggacaggttcccctaaggcacttttaaagatactctgtaagaaccattaacaataaacttactgtcaatcaaaaaaaaaaaaaaaaaaaaaaaaaaaaaa

SEQ ID NO: 2286 - DNA, 638 bp, Homo sapiens
gcggccgcctactactactaaattttcggccggtcgaccaaaacttttttttttttttttttttttttgcggtgaggtggaaggcatttatttgctttgtcttgctaaccctcaaaatcaaagcctgtcccagcctgacagcttccagcagaaagtgtcagaaccagaggcccagccaaggcccaggcagggcaggcggtcctcctgggccctggcattgttcttacaaatggagggcatggccatcttctctttcagggacaggctggcctgacatggaaggtgaaacaaggcagcagcccctgcctccaggagaactctgcagactgcagtgccggggagctgaggggtcctgggaaggagctatggagtcccatccagcaggttacagccacatcctctaaatgggcgcgatttgtcctgccacctagaaaaagttcacatgtggacagtgagcagccaaggtctcttcagagggaccccaggccagctggtccagcacaggctaagcaagggacccccagagcacaggcctcaagagaaggcctcagcaggcccactgccgctgtccagcttcctcgggccacacaccccgtcacatctgggtctgagaggccttgcgggaagacctcatgggg

SEQ ID NO: 2287 - DNA, 672 bp, Homo sapiens
ggttgggatctgccacctgagtggcctgggccggagcaggcgaggtggccggagccgtgtggaccaggaggagcgctttccacagggcctgtggacaggggtggctatgagatcctgccccgaagagcagtactgggatcctctgctgggtacctgcatgtcctgcaaaaccatttgcaaccatcagagccagcgcacctgtgcagccttctgcaggtcactcagctgccgcaaggagcaaggcaagttctatgaccatctcctgagggactgcatcagctgtgcctccatctgtggacagcacccgaagcaatgtgcatacttctgtgagaacaagctcaggagcccagtgaaccttccaccagagctcaggagacagcggagtggagaagttgaaaacaattcagacaactcgggaaggtaccaaggattggagcacagaggctcagaagcaagtccagctctcccggggctgaagctgagtgcagatcaggtggccctggtctacagcacgctggggctctgcctgtgtgccgtcctctgctgcttcctggtggcggtggcctgcttcctcaagaagaggggggatccctgctcctgccagccccgctcaaggccccgtcaaagtccggccaagtcttcccaggatcacgcgatggaagccggcagccc

SEQ ID NO: 2288 - DNA, 451 bp, Homo sapiens
ctttccttcaaatagctccaaataaccccgtgattttggatgattgattatgggaatgctgctttcactgtacatccaagctctcctggcctcagcggataagtatatgagagcacagttttcctggtgtcaggatatgaagatccagggaacaaagaacctcaaagaacaacacctggattgtcaaggtttggccagcagtgcactttctccaaccttacagtcatacgcaagcagttgtggttctcctgtccagcctgccaccactggaccatccctgtatacattccttctccctttgaagaaatccacaaaagaaaaagcatggtatgtagaatcataagactcatagtctggggtcacctctaaaaaaaaaaaaaaaaaaaaaaaaaaaaaaaaaaaaaaaaaaaaaaaaaaaaaaaaaaaaaaaaaaaaaaaaaaaaaaaaagga

SEQ ID NO: 2289 - DNA, 474 bp, Homo sapiens
aattcccgggtcgacccacgcgtccgctttccttcaaatagctccaaataaccccgtgattttggatgattgattatgggaatgctgctttcactgtacatccaagctctcctggcctcagcggataagtatatgagagcacagttttcctggtgtcaggatatgaagatccagggaacaaagaacctcaaagaacaacacctggattgtcaaggtttggccagcagtgcactttctccaaccttacagtcatacgcaagcagttgtggttctcctgtccagcctgccaccactggaccatccctgtatacattccttctccctttgaagaaatccacaaaagaaaaagcatggtatgtagaatcataagactcatagtctggggtcacctctaaaaaaaaaaaaaaaaaaaaaaaaaaaaaaaaaaaaaaaaaaaaaaaaaaaaaaaaaaaaaaaaaaaaaaaaaaaaaaaaa

SEQ ID NO: 2290 - DNA, 459 bp, Homo sapiens; identical to SEQ ID NO: 777

SEQ ID NO: 2291 - DNA, 695 bp, Homo sapiens; identical to SEQ ID NO: 1632
  misc_feature (2)..(2): n equals a,t,g, or c
  misc_feature (29)..(29): n equals a,t,g, or c
  misc_feature (43)..(43): n equals a,t,g, or c
  misc_feature (51)..(51): n equals a,t,g, or c

SEQ ID NO: 2292 - DNA, 1377 bp, Homo sapiens
tcgacccacgcgtccggggagctgagcctagagtccggctgttggctagagtgggcgcggatctggtgtggggaaggcggcgggactcaggcctgcctgcgaagcattgtcctacataatggtagaggacgaactggcacttttcgataaaagcataaatgaattttggaataaattcaaaagtacggacacctcctgtcagatggcgggactaagagatacctacaaggattccatcaaagcatttacaaaagctgtctgtgaaattaaaggaagaagaacgaatggttgagatgtttctggaatatcaaaatcagatcagcaggcaaaataagctcattcaagaaaaaaaggataacttgttaaaattgattgctgaagtaaaaggcaaaaagcaggaattggaagtactgactgcaaatatccaggatcttaaggaagaatattctaggaagaaggaaactatttctactgctaataaagcgaatgcagagaggttgaaaaggctgcagaaatctgcagacttgtataaagatcgacttggactagaaattcgaaaaatttatggtgagaaattgcagtttattttcactaatattgaccctaagaatcctgagagcccatttatgttttccttacatctcaatgaagcaagggactatgaagtgtcagatagtgcccctcatcttgagggcctagcagaatttcaagagaatgtaaggaagaccaacaatttttcagcttttcttgccaatgttcggaaagcttttactgccacggtttataattaacatacaaatagtgtatataaaaacggtttatttttcttctctattacatatctcttttttttcttgtttttattattattatactttaagttttagggtacatgtgcacaatgtgcaggtttgttacatatgtatacatgtgccatattggtgtgctgcacccattaactcgtcatttcattaggtatatctcctaatgctatccctccccgctcccccaacccacaacagtccccgttgtgtgatgttccccttcctgtgtccatgtgttctcattgttcaattcccacctaggagtgagaatatgtggtgtttggttttttgtcctttcgatagtttgctgagaatgatggtttccagcttcatccatgttcctacaaaggacatgaactcatccttttttatggctgcatagtattccatggtgtatatgtgccacattttcttaatccagtctatcattgttggacatttgggttggttccaagtctttgctattgtgaatagtgccgaaataaacatacgtgtgcatgtgaaaaaaaaaaaaaaaaaaaaaaaaaaaaaaaaaaaaaaaaaaaaaaagggc

SEQ ID NO: 2293 - DNA, 849 bp, Homo sapiens
ccacgcgtccgggctggagcacccctgtccctcaccagtcagctgacagtgccggggcacagccttgggcatgaggctcccagcctggtgcaggcacaccacattggcgatctcctgctggcactgcttggtgctggcccgggccagtgcagacagtgcgtccttgcccacgatctcgcacttgggggtgaagccattgtccgtgggctggggggcgccctccacgctccctgtatctccgtgtggtgggaagccagctgcccctaccagcgcctccccagctgctgccccactcaggttctggcggcctggggcttccgggggtggggcaggtgggacccgccggctggctctctgccggctggttactgcccgtaccaccttggccacgggcactcctgggctctcagcacggccccgccagcgcccatgccttctgcctgtgctgccccgtcgccctgctgaactgtctgtgtccttggaaccctcgccagggtccagtggccgtggcttcctctgccttcctttctgtaagagagatgcagacacatcactggggcagaccctcacctcctcctgttccttgagttccatcttggttgggggcaccctcagacctagatgttcctgcccaccttttacccagagaagcgcttttcacctaaggactccgcacaatcagtaccaccatgggagcacctccctggccagccactgagggcgcactgggcctccctccatcataccaacacccccgtcccccactggctctcagattacatggcagtgtgcttggttaaaaaaaaaaaaaaaaaaaaaaaaaaacaaaaaaaaaaaaaaaaaaaaaaa

SEQ ID NO: 2294 - DNA, 849 bp, Homo sapiens; identical to SEQ ID NO: 2293

SEQ ID NO: 2295 - DNA, 917 bp, Homo sapiens
tctaataygactactatagggaaagctggtacgcctgcaggtaccggtccggaattcccgggtcgacccacgcgtccgggctggagcacccctgtccctcaccagtcagctgacagtgccggggcacagccttgggcatgaggctcccagcctggtgcaggcacaccacattggcgatctcctgctggcactgcttggtgctggcccgggccagtgcagacagtgcgtccttgcccacgatctcgcacttgggggtgaagccattgtccgtgggctggggggcgccctccacgctccctgtatctccgtgtggtgggaagccagctgcccctaccagcgcctccccagctgctgccccactcaggttctggcggcctggggcttccgggggtggggcaggtgggacccgccggctggctctctgccggctggttactgcccgtaccaccttggccacgggcactcctgggctctcagcacggccccgccagcgcccatgccttctgcctgtgctgccccgtcgccctgctgaactgtctgtgtccttggaaccctcgccagggtccagtggccgtggcttcctctgccttcctttctgtaagagagatgcagacmcatcactggggcagaccctcmcctcctcctgttccttgagttccatcttggttgggggcaccctcagacctagatgttcctgcccmccttttacccagagaagcgcttttcmcctaaggactccgcmcaatcagtaccmccatgggagcmcctccctggccagccmctgagggcgcactgggcctccctccatcataccaacacccccgtcccccactggctctcagattacatggcagtgtgcttggttaaaaaaaaaaaaaaaaaaaaaaataaaccaaaaaaaaaaaaaaaaaaaaaag

SEQ ID NO: 2296 - DNA, 773 bp, Homo sapiens
gctggagcacccctgtccctcaccagtcagctgacagtgccggggcacagccttgggcatgaggctcccagcctggtgcaggcacaccacattggcgatctcctgctggcactgcttggtgctggcccgggccagtgcagacagtgcgtccttgcccacgatctcgcacttgggggtgaagccattgtccgtgggctggggggcgccctccacgctccctgtatctccgtgtggtgggaagccagctgcccctaccagcgcctccccagctgctgccccactcaggttctggcggcctggggcttccgggggtggggcaggtgggacccgccggctggctctctgccggctggttactgcccgtaccaccttggccacgggcactcctgggctctcagcacggccccgccagcgcccatgccttctgcctgtgctgccccgtcgccctgctgaactgtctgtgtccttggaaccctcgccagggtccagtggccgtggcttcctctgccttcctttctgtaagagagatgcagacacatccctggggcagaccctcacctcctcctgttccttgagttccatcttggttgggggcaccctcagacctagatgttcctgccccccttttacccagagaagcgcttttcacctaaggactccgcccaatcagtacccccatgggagcacctccctggccagccactgagggcgcactgggcctccctccatcataccaacacccccgtcccccactggctctcagattacatggc

SEQ ID NO: 2297 - DNA, 848 bp, Homo sapiens; identical to SEQ ID NO: 782

SEQ ID NO: 2298 - DNA, 1682 bp, Homo sapiens
  misc_feature (1657)..(1657): n equals a,t,g, or c
  misc_feature (1671)..(1671): n equals a,t,g, or c
  misc_feature (1673)..(1673): n equals a,t,g, or c
gcatccccgcgcctgcwtctctgactggggtgaggccgcagcggactgccctttcccaagatggcgtcgaagataggttcgagacggtggatgttgcagctgatcatgcagttgggttcggtgctgctcacacgctgccccttttggggctgcttcagccagctcatgctgtacgctgagagggctgaggcacgccggaagcccgacatcccagtgccttacctgtatttcgacatgggggcagccgtgctgtgcgctagtttcatgtcctttggcgtgaagcggcgctggttcgcgctgggggccgcactccaattggccattagcacctacgccgcctacatcgggggctacgtccactacggggactggctgaaggtccgtatgtactcgcgcacagttgccatcatcggcggctttcttgtgttggccagcggtgctggggagctgtaccgccggaaacctcgcagccgctccctgcagtccaccggccaggtgttcctgggtatctacctcatctgtgtggcctactcactgcagcacagcaaggaggaccggctggcgtatctgaaccatctcccaggaggggagctgatgatccagctgttcttcgtgctgtatggcatcctggccctggcctttctgtcaggctactacgtgaccctcgctgcccagatcctggctgtactgctgccccctgtcatgctgctcattgatggcaatgttgcttactggcacaacacgcggcgtgttgagttctggaaccagatgaagctccttggagagagtgtgggcatcttcggaactgctgtcatcctggccactgatggctgagttttatggcaagaggctgagatgggcacagggagccactgagggtcaccctgccttcctccttgctggcccagctgctgtttatttatgctttttggtctgtttgtttgatcttttgcttttttaaaattgttttttgcagttaagaggcagctcatttgtccaaatttctgggctcagcgcttgggagggcaggagccctggcactaatgctgtacaggtttttttcctgttaggagagctgaggccagctgcccactgagtctcctgtccctgagaagggagtatggcagggctgggatgcggctactgagagtgggagagtgggagacagaggaaggaagatggagattggaagtgagcaaatgtgaaaaattcctctttgaacctggcagatgcagctaggctctgcagtgctgtttggagactgtgagagggagtgtgtgtgttgacacatgtggatcaggcccaggaagggcacaggggctgagcactacagaagtcacatgggttctcagggtatgccaggggcagaaacagtaccggctctctgtcactcaccttgagagtagagcagaccctgttctgctctgggctgtgaaggggtggagcaggcagtggccagctttgcccttcctgctgtctctgtttctagctccatggttggcctggtgggggtggagttccctcccaaacaccagaccacacagtcctccaaaaataaacattttatatagamaaaaaaaaaaaaaaaaagggcggccgctctagaggatccctcgaggggcccaagcttacgcgtgcatgcgacgtcatagctctntccctatagaagtngnaaagggttc

SEQ ID NO: 2299 - DNA, 1040 bp, Homo sapiens
  misc_feature (970)..(970): n equals a,t,g, or c
cgggataggttcgagacggtggatgttgcagctgatcatgcagttgggttcggtgctgctcacacgctgccccttttggggctgcttcagccagctcatgctgtacgctgagagggctgaggcacgccggaagcccgacatcccagtgccttacctgtatttcgacatgggggcagccgtgctgtgcgctagtttcatgtcctttggcgtgaagcggcgctggttcgcgctgggggccgcactccaattggccattagcacctacgccgcctacatcgggggctacgtccactacggggactggctgaagcggtgctggggagctgtaccgccggaaacctcgcagccgctccctgcagtccaccggccaggtgttcctgggtatctacctcatctgtgtggcctactcactgcagcacagcaaggaggaccggctggcgtatctgaaccatctcccaggaggggagctgatgatccagctgttcttcgtgctgtatggcatcctggccctggcctttctgtcaggctactacgtgaccctcgctgcccagatcctggctgtactgctgccccctgtcatgctgctcattgatggcaatgttgcttactggcacaacacgcggcgtgttgagttctggaaccagatgaagctccttggagagagtgtgggcatcttcggaactgctgtcatcctggccactgatggctgagttttatggcaagaggctgagatgggcacagggagccactgagggtcaccctgccttcctccttgctggcccagctgctgtttatttatgctttttggtctgtttgtttgatcttttgcttttttaaaattgttttttgcagttaagaggcagctcatttgtccaaatttctgggctcagcgcttgggagggcaggagccctggcactaatgctgtacaggtttttttcctgttaggagagctgaggccagctgcccacncccgtctcctgtccctgagaagggagtatggcaaggctgggatgcggctactgagagtgggagagtggga

SEQ ID NO: 2300 - DNA, 1545 bp, Homo sapiens
acgcgtccggtcgaagataggttcgagacggtggatgttgcagctgatcatgcagttgggttcggtgctgctcacacgctgccccttttggggctgcttcagccagctcatgctgtacgctgagagggctgaggcacgccggaagcccgacatcccagtgccttacctgtatttcgacatgggggcagccgtgctgtgcgctagtttcatgtcctttggcgtgaagcggcgctggttcgcgctgggggccgcactccaattggccattagcacctacgccgcctacatcgggggctacgtccactacggggactggctgaaggtccgtatgtactcgcgcacagttgccatcatcggcggctttcttgtgttggccagcggtgctggggagctgtaccgccggaaacctcgcagccgctccctgcagtccaccggccaggtgttcctgggtatctacctcatctgtgtggcctactcactgcagcacagcaaggaggaccggctggcgtatctgaaccatctcccaggaggggagctgatgatccagctgttcttcgtgctgtatggcatcctggccctggcctttctgtcaggctactacgtgaccctcgctgcccagatcctggctgtactgctgccccctgtcatgctgctcattgatggcaatgttgcttactggcacaacacgcggcgtgttgagttctggaaccagatgaagctccttggagagagtgtgggcatcttcggaactgctgtcatcctggccactgatggctgagttttatggcaagaggctgagatgggcacagggagccactgagggtcaccctgccttcctccttgctggcccagctgctgtttatttatgctttttggtctgtttgtttgatcttttgcttttttaaaattgttttttgcagttaagaggcagctcatttgtccaaatttctgggctcagcgcttgggagggcaggagccctggcactaatgctgtacaggtttttttcctgttaggagagctgaggccagctgcccactgagtctcctgtccctgagaagggagtatggcagggctgggatgcggctactgagagtgggagagtgggagacagaggaaggaagatggagattggaagtgagcaaatgtgaaaaattcctctttgaacctggcagatgcagctaggctctgcagtgctgtttggagactgtgagagggagtgtgtgtgttgacacatgtggatcaggcccaggaagggcacaggggctgagcactacagaagtcacatgggttctcagggtatgccaggggcagaaacagtaccggctctctgtcactcaccttgagagtagagcagaccctgttctgctctgggctgtgaaggggtggagcaggcagtggccagctttgcccttcctgctgtctctgtttctagctccatggttggcctggtgggggtggagttccctcccaaacaccagaccacacagtcctccaaaaataaacattttatatagaaaaaaaaaaaaaaaaaaaaaaaaaaaaaa

SEQ ID NO: 2301 - DNA, 1545 bp, Homo sapiens; identical to SEQ ID NO: 2300

SEQ ID NO: 2302 - DNA, 783 bp, Homo sapiens
aagggttgctagatcttccagcttagttctcctctacactccctgttgacaagtaccctagaaccacaaggccattgcagtgtaaaagtattgagttaatgtgttcagatgaatttgggcctttggagcaaaaacaattatccattctcaaactgatgaaattagtgccatgctttgtaatttggccctcaaactacttaactgtgtatctgcctggaatatgaatataagactgaaatgtctgttaaaacccaaaaatgtctccaaagtctgttcccggggcctttatttcatatatgttatggactctctttaattcagccatagatggcaagccatttgttagaaattatggccaggtgcagctgctcacgcctatagtcccagcactttgggaggctgtggcgggcagatcacctgaggtcgggagtttgagaccagcctggccaacatgatgaaaccctgtctctactaaaaatacaaaaattagccgggcgtggtggtgtgtgtctgtcatgccagctactcaggaggctgagacaggagaatcgcttaaacccaggaggtggaggttgcagtgagtcaagattgcgccattgcactgcagtctgggtgacagaacgaaactccattacaaaaaaaaaaagagagaaattatgctcaaggccgagcaaggtggctcacgcctgtaatcccagcactttgggaggctgaggtggacagactgcttgagcccaagaatttgagaccagcgtgggcaacatggtgagaccttgtctctac

SEQ ID NO: 2303 - DNA, 1238 bp, Homo sapiens
  misc_feature (1227)..(1227): n equals a,t,g, or c
cccacgcgtccgtgcacagttgcagttagttattccaggtattatttttgttttcagaaaaagaaaactcagtagaagataatggcaagtccagactggggatatgatgacaaaaatggtcctgaacaatggagcaagctgtatcccattgccaatggaaataaccagtcccctgttgatattaaaaccagtgaaaccaaacatgacacctctctgaaacctattagtgtctcctacaacccagccacagccaaagaaattatcaatgtggggcattccttccatgtaaattttgaggacaacgataaccgatcagtgctgaaaggtggtcctttctctgacagctacaggctctttcagttccattttcactggggcagtacaaatgagcatggttcagaacatacagtggatggagtcaaatattctgccgagcttcacgtagctcactggaattctgcaaagtactccagccttgctgaagctgcctcaaaggctgatggtttggcagttattggtgttttgatgaaggttggtgaggccaacccaaagctgcagaaagtacttgatgccctccaagcaattaaaaccaagggcaaacgagccccattcacaaattttgacccctctactctccttccttcatccctggatttctggacctaccctggctctctgactcatcctcctctttatgagagtgtaacttggatcatctgtaaggagagcatcagtgtcagctcagagcagctggcacaattccgcagccttctatcaaatgttgaaggtgataacgctgtccccatgcagcacaacaaccgcccaacccaacctctgaagggcagaacagtgagagcttcattttgatgattctgagaagaaacttgtccttcctcaagaacacagccctgcttctgacataatccagtaaaataataatttttaagaaataaatttatttcaatattagcaagacagcatgccttcaaatcaatctgtaaaactaagaaacttaaattttagttcttactgcttaattcaaataataattagtaagctagcaaatagtaatctgtaagcataagcttatgcttaaattcaagtttagtttgaggaattctttaaaattacaactaagtgatttgtatgtctatttttttcagtttatttgaaccaataaaataattttatctctttaaaaaaaaaaaaaaaaaccccggggggggncccggtcccca

SEQ ID NO: 2304 - DNA, 1533 bp, Homo sapiens
  misc_feature (11)..(11): n equals a,t,g, or c
  misc_feature (14)..(14): n equals a,t,g, or c
  misc_feature (27)..(27): n equals a,t,g, or c
  misc_feature (1523)..(1523): n equals a,t,g, or c
  misc_feature (1525)..(1525): n equals a,t,g, or c
  misc_feature (1532)..(1533): n equals a,t,g, or c
acgaacggaanacnccttcactaaagngaacaaaagctggagctccaccgcggtggcggccgctctagaactagtggatcccccgggctgcaggcttgggtcttagcatgctgattgactcccagaacaaccagtatattttgaccaagcccagagattcaaccatcccacgtgcagatcaccactttataaaggacattgttaccataggaatgctgtccttgccttgtggctggctatgtacagccataggattgcctacaatgtttggttatattatttgtggtgtacttctgggaccttcaggactaaatagtattaagtctattgtgcaagtggagacattaggagaatttggggtgttttttactctttttcttgttggcttagaattttctccagaaaagctaagaaaggtgtggaagatttccttacaagggccgtgttacatgacactgttaatgattgcatttggcttgctgtgggggcatctcttgcggatcaaacccacgcagagcgtcttcatttccacgtgtctgtccttgtcaagcacacccctcgtgtccaggttcctcatgggcagtgctcggggtgacaaagaaggcgacattgactacagcaccgtgctcctcggcatgctggtgacgcaggacgtgcagctcgggctcttcatggccgtcatgccgactctcatacaggcgggcgccagtgcatcttctagcattgtcgtggaagttctccgaatcctggttttgattggtcagattcttttttcactagcggcggtttttcttttatgtcttgttataaagaagtatctcattggaccctattatcggaagctgcacatggaaagcaaggggaacaaagaaatcctgatcttgggaatatctgcctttatcttcttaatgttaacggtcacggagctgctggacgtctccatggagctgggctgtttcctggctggagcgctcgtctcctctcagggccccgtggtcaccgaggagatcgccacctccatcgaacccatccgcgacttcctggccatcgttttcttcgcctccatagggctccacgtgttccccacgtttgtggcgtacgagctcacggtgctggtgttcctcaccttgtcagtggtggtgatgaagtttctcctggcggcgctggtcctgtctctcattctgccgaggagcagccagtacatcaagtggatcgtctctgcggggcttgcccaggtcagcgagttttcctttgtcctggggagccgggcgcgaagagcgggcgtcatctctcgggaggtgtacctccttatactgagtgtgaccacgctcagcctcttgctcgccccggtgctgtggagagctgcaatcacgaggtgtgtgcccagaccggagagacggtccagcctctgatggctcggagatgatggaccgtggaagggaagcgtctgtggggagtgagcgcttagatggccagcagctgctccttctggkaagctaaatcaaagaatgaagtcccctatnanccggcgnn

SEQ ID NO: 2305 - DNA, 1183 bp, Homo sapiens
gtctcctctcagggccccgtggtcaccgaggagatcgccacctccatcgaacccatccgcgacttcctggccatcgttttcttcgcctccatagggctccacgtgttccccacgtttgtggcgtacgagctcacggtgctggtgttcctcaccttgtcagtggtggtgatgaagtttctcctggcggcgctggtcctgtctctcattctgccgaggagcagccagtacatcaagtggatcgtctctgcggggcttgcccaggtcagcgagttttcctttgtcctggggagccgggcgcgaagagcgggcgtcatctctcgggaggtgtacctccttatactgagtgtgaccacgctcagcctcttgctcgccccggtgctgtggagagctgcaatcacgaggtgtgtgcccagaccggagagacggtccagcctctgatggctcggagatgatggaccgtggaagggaagcgtctgtggggagtgagcgcttagatggccagcagctgctccttctgggaagctcgcaccttggcaacagaacagccctctagcagagcgtcagtgcagtcgtgttatcccggcttttacagaatattcttgtcctattttagaattttccggagtagtttatttgcagtctgttgattatgtgcagtagacccgggacactgcgttttaccgatcaccttgaatgtggtgcctggatgtgccttttttttttttccctgaaattattattaattttctattgtgagttcatcagttcatagtttttttagtaaagaagcaaaattaaaaggcttttaaaaatgtacaacttcagaattataatctgttagtcaaatatttgttattaaacatttctgtaatatgaagttgtaatcctggccgtgagcttggaagcttacttttgattcttaaagcctatgttttctaaaatgagacaaatacggatgtctatttgccttttattgtaacttttaaatgaaataatttcatgtcaatttctattagatatatcacttaaaatatttggttttaaatcacaagaatatgtattctttaataaagataatttatgatcatggtataattaattgaaatttattaaaatctgtttttattaaaaaaaaaaaaaaaaaaactcgagggggggcccggtacccaattcgccctaggaa

SEQ ID NO: 2306 - DNA, 3039 bp, Homo sapiens
gggcagtcattccatatgctaatcatgaactgaaagaagagaaccggatagactctgtggtggaaaaaactgttgcctgaactttgtcagagaataaaatgtggtggagagaagtatcaactctacctgtcatcattaaaagaaacattgtcaattgttgctgtggaactagaactgaaggatttcatgaatgttctcccagaagatggtactgcaacatttttcttgccatatcttctctattgcagtcgaaagaaaccattgacttaaaggtatcatttgaaaaataccataatggcatttgagactgaatttctaaaaattgaatgccaaagtacaagtagaggagttttttattttatatatcacacacacacacacacacacacacacacacacacacatatatgatacaaatgctttcaggctgcttaccttaccgtgtagtggtaactattcacttcttaatttatgacctcaatcaatttaattgtctagaatgtaaaaagtctttaagacataagaattcctcaaagaagccatacattttttaaggtggggattgacttttattccaaggaacaacatcagttcactgttgttggagacatgacaatcattttcatcccaagaacactttaaggaaacattttacaagtatgcttgaaagaatgtcactaactggtccagaattttatcttcttgatttttccagatttctctatgtttttgagaaagatgttaatgttttgccatggtaaaagatttcaaacctcattttttttgttccttttcttgttacttttaagaaaactcatgctctgtttctctgaatcaaatgaagtagaagtttacaaagctaactttcttcttgtctagctattaacatgatttgtcaaatgcatgtttttttcagccaaagccttgtttccatttttgttgatgtgtactcttgctcttttagctagagtgtatgtgaaaataaagaaatacatcattgtattcacaaccatgtgtcttcatttataactttttgtttaaaaaatttttagttcaagtttagttcattgatattatcctctgaatgcagttaaggctgggcagaaattctactcatgtgacatctgccacaggtctattttgaagcttttcttctaatggcaatgtttgtccttaccaggatttaatctatagaattgtctctcaactctgcttttctccagttccagataacgtccttaagaccatctgttcaggggttcacaaaactcaaatttgtgtcattctattttatttattttattttttatttccttccctcataccttgcccattccctctgaatattaggtgtgatgtcaacagcatgttagaaggatcaatgggaaggcaatgattgaaaacatttcaatgaaccttaatagtgttcctttgaggagcacccaggagaatatctggtcatagatctttttttaaatgcagttttataaaaccctaacagcggtgatatcattagactgtatgaatcagttttattacctagtgtacaagtgtcagtcatgtatcattatatagtctgttgatctttccatttgcaaaaaattaatagttttcccccacaaatgtacaaagttgtatgcttccagtcttcttttaatgtttatagtcattccaaagtaacattctattttacactttcacatacattgttatgaatcattggtttttctcttttttccacttatcaccaatttatttcattcagccagatttggtgtctatagaaaaagaaattttaagaccattattaaaaataatatatggttagaaattagtagatggttctttaaatgtattccaatttttaatgttactttactcctgattcatttatatttttctgctttttatatgtttaaaaatctctcattctattgctgctttatttaaagaaagattactttcttccctacaagatctttattaattgtaaagggaaaatgaataactttacaatggagacacctggcagacaccatcttaaccaaagcttgaagttaacataaccagtaatagaactgatcaatatcttgtgcctcctgatatggtgtactaagaaaaacacaacatcatgccatgatagtcttgccaaaagtgcataacctaaatctaatcataaggaaacattagacaaactcaaattgaaggacattctacaaagtgccctgtattaaggaattattcagagtaaagragacttaaaagacatggcamcaatgcagtacatgatccgggattttctttttctgtaaagaacatgattaggattattagcgaaatttgaagatctctagtttttaaatcattgttgcttttctaatttcgatcattgtattgtggtcatgtacaagaatattcttgtttttaggaaagatagttgtatgtgtatctatacacgtctgtgtgtgtacatatagagggtgagcatgagagggagatagggaaaagaatgagaaagccaatgtggctacgcacatcattaatatttggggaatctgggtgaaaggtatatgggaatctgaaattatgtcaaaaaagtttcaaaagtttctcttcattgaattaatatgttgttatacattcagtaagcaaactattgtattggatttgggtacttagctagaaatacagaatatatagtccctgcctgtaagaaatttaaagctaagcaggcttttctaagactcataattaatgtaaacttgctcaaagctttattggacttatttaaagatgattcagactgataaacatggccactgattttatgggccaaagatagttcaaactatctttttttattcagtctgctgctttcagtctcatgcaataccttttctctttgcaaaagtcaaatttctctttaattttttatctagtgttgatttttacttcatatttgctatttgttctgtaatttttactatagctttaaaaactatctcgcctttcttaaccaagcagtaatctccctcttct

SEQ ID NO: 2307 - DNA, 386 bp, Homo sapiens
gtgcttcttgatttttccagatttctctatgtttttgagaaagatgttaatgttttgccatggtaaaagatttcaaacctcattttttttgttccttttcttgttacttttaagaaaactcatgctctgtttctctgaatcaaatgaagtagaagtttacaaagctaactttcttcttgtctagctattaacatgatttgtcaaatgcatgtttttttcagccaaagccttgtttccatttttgttgatgtgtactcttgctcttttagctagagtgtatgtgaaaataaagaaatacatcattgtattcacaaaaaaaaaaaaaaaaaaaaaaaaaaaaaaaaaaaaaaaaaaaaaaaaaaaaaaaaaaaaaaaaaaaaaaaaac

SEQ ID NO: 2308 - DNA, 940 bp, Homo sapiens; identical to SEQ ID NO: 1438

SEQ ID NO: 2309 - DNA, 1001 bp, Homo sapiens
  misc_feature (787)..(787): n equals a,t,g, or c
  misc_feature (967)..(967): n equals a,t,g, or c
  misc_feature (972)..(972): n equals a,t,g, or c
gctctggtctaagaggtagggacaggggttctgtccctaatgagctgtgtgccccgtgcacctccttcatagaatacgaggacgggatagaaccctgagggctccttccagctcccagagtcctgattccagggctgtgctctgtcaataagtgtcccccagcctgggcagaccccagtcccttctgtaaggtagacgcaaagcaaagaggttatgaccggctcacccaggggcctgggaagctatggccatatgcccacttcactctgcaggacaagtggcctgtccccactatattcacctcctcacccctctcccttggatggaccatggtggtgtcacccaaagcaaattgacactatttttcccttggtaaccgcaaagggggagaatcacccgtctcctaattttaaccagtacgtgagggaccagggcgccatgaccgaccagctgagcaggcggcagatccgcgagtaccaactctacagcaggaccagtggcaagcacgtgcaggtcaccgggcgtcgcatctccgccaccgccgaggacggcaacaagtttgccaagctcatagtggagacggacacgtttggcagccgggttcgcatcaaaggggctgagagtgagaagtacatctgtatgaacaagaggggcaagctcatcgggaagcccagcgggaagagcaaagactgcgtgttcacggagatcgtgctggagaacaactatacggccttccagaacgcccggcacgagggctggttcatggccttcacgcggcaggggcggncccgccaggcttcccgcarcccgccagaaccagcgcgaggcccacttcatcaagccgccttctaccaarggccaagcttgcctttccccaaccaacgccgaagaaagcaagaaacaagtttcsaagttttgtgggcttccggccccaaccccggccggaaccaaagcgcaacaaccgggnggggnccccccaaggccccctttaaccgttaaat

SEQ ID NO: 2310 - DNA, 2222 bp, Homo sapiens
  misc_feature (2)..(2): n equals a,t,g, or c
  misc_feature (2212)..(2212): n equals a,t,g, or c
  misc_feature (2214)..(2215): n equals a,t,g, or c
gncccgaggctgcgtggtggagggcaaccccgtgctggcaggatcctgcgactcaacgtgcagccatctggtggtgcccatcctgctcctggtcagcctgggctcggycctggcctgtctcacccacacaccctccttcatgctcatcctaagaggagtgaagaaagaagacaagactttggctgtgggcatccagttcatgttcctgaggattttggcctggatgcccagccccgtgatccacggcagcgccatcgacaccacctgtgtgcactgggccctgagctgtgggcgtcgagctgtctgtcgctactacaataatgacctgctccgaaaccggttcatcggcctccagttcttcttcaaaacaggttctgtgatctgcttcgccttagttttggctgtcctgaggcagcaggacaaagaggcaaggaccaaagagagcagatccagccctgccgtagagcagcaattgctagtgtcggggccagggaagaagccagaggattcccgagtgtgagctgtcttggggccccacctggccaagagtagcagccacagcagtacctcctctgagtcctttgcccaagattgggtgtcaagagccctgtgttccattctggctcctccactaaattgctgtgtgacttcaggcaagacattgatcctctctcagcctttgcttgctagtctgaaccaaagagttgtttgggcatttgctgtgttggccatttctggagcaagagggtcttcttcctccttcccccagccagccagctgtcctggggccaggctttcctgggtggaaagaagtatacctttccctggggccctaggatagcaaagtgagccatagtgggccaggctgccctccatgctgggccccagcccaggtctgcactcgcctggatcaccttctttgagccttagccatctcctgtcaggtaggaatgaacttgccagccttcaggctcgttcagctatgaccatctgtgcggtcagggtacactcagctctcctccccaactccagcagcctttaagaagtgtccctttggcgccccctggaggcagagcactgagctggaccctgggtagactcccacagggaggacggagctggcctcaggagtgggacacccagacttggcagggccttcaagaggcctgtgtgggggccccaggaatccttagctgaagcggggagactcactctccatctcaggaaattctagcccttgccctcagggagccacggttgagggtgaggcccaacacctgccttagggccctgggtgggcaagtctgggccctggggtagggagggagactcaggcccacacttgggtattttctaatttcagacaaacacacactcagcgcgcactcactgattcctacacattgccaagatttcacacatgtgaccaggggccaccaaagtccctgtgacctttgtgactaggatcctaatttctctattttctcctgggtgcctgggtctgtgtcacctggggcagtgtggataatgtttagttctgtgacactgttttttgggggtggcacctggttctccgatgcctgggctggtgtcaggcccaggactgtagtgctgggagcagtaaagctcagctctgtgtaatgagtgatgctatggcttgctcgtgtcttatgatccaatccttttctacatcagcccttgttttgttttatggctagtcttatctggcctggttatttccttgcggggaggagagggtttgctaatctgctcccagcccaacctattaccaccccacctcgctgggacctactgctcgggaggcagcagacagggagccaccagcagtggcttcctggccctgtgctgggggtggggggaagctgggggcacatgtggcccttgccttctgagcagctcccagtgccagggctttgagactttcccacatgataaaagaaaagggaggtacagaagttccaattccctttttattttgctggttggtatctgtaaatgtttaataaatatctgagcatgtatctatcaacgccaagaatttcaaagtctccttcaacaatatgaggcttttaggatgtttatattccttcatccctcttgtttcccaggttttgcagggaaaaaaagtctggaattatagatacagcttattattaaatttgttcttgcataaaaaaaaaaaaaaaaaacncnnggggggg

SEQ ID NO: 2311 - DNA, 1911 bp, Homo sapiens
  misc_feature (1911)..(1911): n equals a,t,g, or c
gaattcggcacgaggttctcccttgtttttcctgaaatcctgtttttggtttcaacacggaagggctaatcatgtggtccttgagaatgaaacagattctgatcctacacctaatgactgttttgaaccagtgtctccagaattctgtgggaaagaagccatcagaatcaaaaatcttaaaaaagaatatgcagggaagtgtgagagagtagaagctttgaaaggtgtggtgtttgacatatatgaaggccagatcactgccctccttggtcacagtggagctggaaaaactaccctgttaaacatacttagtgggttgtcagttccaacatcaggttcagtcactgtctataatcacacactttcaagaatggctgatatagaaaatatcagcaagttcactggattttgtccacaatccaatgtgcaatttggatttctcactgtgaaagaaaacctcaggctgtttgctaaaataaaagggattttgccacatgaagtggagaaagaggtatgtgagcatattagatgtcacacagccataaaaaagagaactctttgttaaagaagagaataagatttttggaagaaaagctaatagctcgatttgaagaagaaacaagttccgtgggacgagaacaagtaaataaggcctatcatgcatatcgagaggtttgcattgatagagataatttgaagagcaaactggacaaaatgaataaagacaactctgaatctttgaaagtattgaatgagcagctacaatctaaagaagtagaactcctccagctgaggacagaggtggaaactcagcaggtgatgaggaatttaaatccaccttcatcaaactgggaggtggaaaagttgagctgtgacctgaagatccatggtttggaacaagagctggaactgatgaggaaagaatgtagcgatctcaaaatagaactacagaaagccaaacaaacggatccatatcaggaagacaatctgaagagcagagatctccaaaaactaagcatttcaagtgataatatgcagcatgcatactgggaactgaagagagaaatgtctaatttacatctggtgactcaagtacaagctgaactactaagaaaactgaaaacctcaactgcaatcaagaaagcctgtgcccctgtaggatgcagtgaagaccttggaagagacagcacaaaactgcacttgatgaattttactgcaacatacacaagacatccccctctcttaccaaatggcaaagctctttgtcataccacatcttcccctttaccaggagatgtaaaggttttatcagagaaagcaatcctccaatcatggacagacaatgagagatccattcctaatgatggtacatgctttcaggaacacagttcttatggcagaaattctctggaagacaattcctgggtatttccaagtcctcctaaatcaagtgagacagcatttggggaaactaaaactaaaactttgcctttacccaaccttccaccactgcattacttggatcaacataatcagaactgcctttataagaattaattkggaagagattcacgatttcaccatgaggacacttatctctttcagtggtcctcccaagaaattatttamcamactgrargggagcatttgrttaccacttggcgaggtctccagcatctatattgaacccactgtcaatagtcaaaaacaacatggtgggttctaggttgaagaggcctctatcatatttagaactgaaatggcctaccattaacgtactgggggaacccggcctatatggatgcccacaaagagggatgtgggggcacagagagcacaggcaaagagaaggagggcagcggctgggcagcaaaacaacaacggcacgcctgtcgataataaaaaatacgn

SEQ ID NO: 2312 - DNA, 2297 bp, Homo sapiens
gctttttagcctgtgcccctgtaggatgcagtgaagaccttggaagagacagcacaaaactgcacttgatgaattttactgcaacatacacaagacatccccctctcttaccaaatggyaaagctctttgtcataccacatcttcccctttaccaggagatgtaaaggttttatcagagaaagcaatcctccaatcatggacagacaatgagagatccattcctaatgatggtacatgctttcaggaacacagttcttatggcagaaattctctggaagacaattcctgggtatttccaagtcctcctaaatcaagtgagacagcatttggggaaactaaaactaaaactttgcctttacccaaccttccaccactgcattacttggatcaacataatcagaactgcctttataagaattaatttggaagagattcacgatttcaccatgaggacacttatctctttcagtggtcctcccaagaaattatttaacaaactgaaaggagattttgattaaaattttgcagaggtcttcagtatctatatttgaacacactgtacaatagtacaaaaaccaacatagttggttttctagtatgaaagagcaccctctagctccatattctaagaatctgaaatatgctactatactaattaataagtaaacttaaggtgtttaaaaaactctgccttctatattaattgtaaaattttgcctctcagaagaatggaattggagattgtagacgtggttttacaaaatgtgaaatgtctaaatatctgttcataaaaataaaaggaaaacatgtttcttcaaattgcataatggaacaaatggcaatgtgagtaggttacatttctgttgttataatgcgtaaagatattgaaaatataatgaaataaaagcatcttaggttataccatctttatatgctattgcgtttcaatatttaagatttaaagtgattttttggtcacagtgttttgttgataaaatttttttagaattgaagtttgaattctaagacttgaaacaacctgatcactgaagccaactttgtcccagcacattccttaagtcctaattgggaaaaaaaaaaaaaaaaatgaaatagttgaaaaactctggggtgtaaacaaatgattgtaaccctacacactattcaataagtagtagaaggagcatcacacagatttcagtctaatctgcccttctgtgggccataatataaacataaatgtgtgtaatgataaaaagtcattttcttcaaagagactacagctagctgcacattgtgtagagcagcttctaaattgttagactttgtgttgaaatgtaatattctatttattgagaaagtgatttaaaattattatttttaatcatagaaatcagggtttgggctgtattgatattgtcgatcatgaaatgtccacacttattctaagtggccaattatttggaaataaagaaggaaataaagatggcttcacatggaaatttaagttctttcagggtggagatttacttggttcatacaccttttgcctgaattaaagtatttcatgtaggaggacttttatcctttttgatagacagtttcatatatcttgaactcaatatctcagatctcttctactgtattactgaatagcatacatacatagacaatgttcgccattcactagatatttttttctattatcttacacttattcaagcttgtctgtgattaatggaattggtgtcagatgctggaatttattctgaccaatgaacacagctgactcaggggagtacaatctcctgccaagtaatagaaccaaacccaatatgcataaaagaaatacaatactccaggctttagctgaaggaagcaactacctgtgtaataacaaagcagcaaaaactatttctcatgtggctgcataggctgtatattatatctgatctctaatgtagcttactggtttgccttttttaaaaccaaaattggaaattttcctttgtaaagaaaaaaagtcttatgagataattgcttgattaatgttttgaacaataccaagaaattgtttaattaaaataaatatttttgtttgaaattgaagtggatgtgaaatattgtccttgcctatagatctcaaaatctagtactaattgttggttgttaatatgattcatacaataracatttgttaaaccagctttkgagtggagaaaaattattttccatttaaacagtacagtgatratrgctatcaaacaggtwtactaaaaagtcagtgactgtgaca

SEQ ID NO: 2313 - DNA, 2238 bp, Homo sapiens
ggcacgaggttctcccttgtttttcctgaaatcctgtttttggtttcaacacggaagggctaatcatgtggtccttgagaatgaaacagattctgatcctacacctaatgactgttttgaaccagtgtctccagaattctgtgggaaagaagccatcagaatcaaaaatcttaaaaaagaatatgcagggaagtgtgagagagtagaagctttgaaaggtgtggtgtttgacatatatgaaggccagatcactgccctccttggtcacagtggagctggaaaaactaccctgttaaacatacttagtgggttgtcagttccaacatcaggttcagtcactgtctataatcacacactttcaagaatggctgatatagaaaatatcagcaagttcactggattttgtccacaatccaatgtgcaatttggatttctcactgtgaaagaaaacctcaggctgtttgctaaaataaaagggattttgccacatgaagtggagaaagaggtatgtgagcatattagatgtcacacagccataaaaaagagaactctttgttaaagaagagaataagatttttggaagaaaagctaatagctcgatttgaagaagaaacaagttccgtgggacgagaacaagtaaataaggcctatcatgcatatcgagaggtttgcattgatagagataatttgaagagcaaactggacaaaatgaataaagacaactctgaatctttgaaagtattgaatgagcagctacaatctaaagaagtagaactcctccagctgaggacagaggtggaaactcagcaggtgatgaggaatttaaatccaccttcatcaaactgggaggtggaaaagttgagctgtgacctgaagatccatggtttggaacaagagctggaactgatgaggaaagaatgtagcgatctcaaaatagaactacagaaagccaaacaaacggatccatatcaggaagacaatctgaagagcagagatctccaaaaactaagcatttcaagtgataatatgcagcatgcatactgggaactgaagagagaaatgtctaatttacatctggtgactcaagtacaagctgaactactaagaaaactgaaaacctcaactgcaatcaagaaagcctgtgcccctgtaggatgcagtgaagaccttggaagagacagcacaaaactgcacttgatgaattttactgcaacatacacaagacatccccctctcttaccaaatggcaaagctctttgtcataccacatcttcccctttaccaggagatgtaaaggttttatcagagaaagcaatcctccaatcatggacagacaatgagagatccattcctaatgatggtacatgctttcaggaacacagttcttatggcagaaattctctggaagacaattcctgggtatttccaagtcctcctaaatcaagtgagacagcatttggggaaactaaaactaaaactttgcctttacccaaccttccaccactgcattacttggatcaacataatcagaactgcctttataagaattaatttggaagagattcacgatttcaccatgaggacacttatctctttcagtggtcctcccaagaaattatttaacaaactgaaaggagattttgattaaaattttgcagaggtcttcagtatctatatttgaacacactgtacaatagtacaaaaaccaacatagttggttttctagtatgaaagagcaccctctagctccatattctaagaatctgaaatatgctactatactaattaataagtaaacttaaggtgtttaaaaaactctgccttctatattaattgtaaaattttgcctctcagaagaatggaattggagattgtagacgtggttttacaaaatgtgaaatgtctaaatatctgttcataaaaataaaaggaaaacatgtttcttcaaattgcataatggaacaaatggcaatgtgagtaggttacatttctgttgttataatgcgtaaagatattgaaaatataatgaaataaaagcatcttaggttataccatctttatatgctattgcgtttcaatatttaagatttaaagtgattttttggtcacagtgttttgttgataaaatttttttagaattgaagtttgaattctaagacttgaaacaacctgatcactgaagccaactttgtcccagcacattccttaagtcctaattgggaaaaaaaaaaaaaaaaa

SEQ ID NO: 2314 - DNA, 1880 bp, Homo sapiens
  misc_feature (867)..(867): n equals a,t,g, or c
gagctgatgagacggaagtcctgagagtttgaccgatttaaggtcacgtgcctaggaagtgctggaaccaagactcggagttttctctaagtttagtgcctttattttgttttaaaccacactgttgcatttccccccattttggaaagctttatagttggaaagaatgaaaacctgatctgaccccttcattttatggttgaaacaaaatctacgtaggagaaatcacttggtacaagtcacaagtcagtggtagagctgccgcaaatgctttttgaatacgtgtgattatgaatctaaatggcagatggcagggagtgataagtggatgtttcaaggattgtcttcagtcatggccttgggattaaagtgcttccgcatggtccaccctacctttcgcaattatcttgcagcctctatcagacccgtttcagaagttacactgaagacagtgcatgaaagacaacatggccataggmaatacatggcctattcagctgtaccagtccgccattttgctaccaagaaagccaaagccaaagggaaaggacagtcccaaaccagagtgaatattaatgctgccttggttgaggatataatcaacttggaagaggtgaatgaagaaatgaagtctgtgatagaagctctcaaggataatttcaataagactctcaatataaggacctcaccaggatcccttgacaagattgctgtggtaactgctgacgggaagcttgctttaaaccagattagccagatctccatgaagtcgccacagctgattttggtgaatatggccagcttcccagagtgtacagctgcagctatcaaggctataagagaaagtggaatgaatcttgaacccanaagtgggaaggggacgctaattcgggtaccccattcccccaatcagccaaatggccgatgacacagtggcagaactggacaggcatctggcagtgaagaccaaagaactccttggatgaaagtccactggggccagcaatactccagagcccagtttctgctggatcccatgggtggcacattgggacttctctccctcccccatctacacagaagactgtcaccatgctgacagaagcctgtccttgtaaggcccagccttccaggggaacactcagacatgttcattctcttcctgcttctgctctgggccggtgggtggctctcagaaaatacttgctgctggcaaaaggcctgtactcaggcatttgctttgacttgatgttgccaagggactgaggccattggcaggcttagtaccacctgctcctcatcttaggagtctccttttcaaataattaggctctgttcccattttaaaactctgatattggccttcacctgtgactggacactttactagaggcccattttcactaaacaataaaatctaaataaattggaaggaataacaaccacaaaggaaagaatagagttggtctggattgatgatcactgaggatctgtatgtgaggcacccataacagtagttttgcctgtgagtcgtcttcacacatgctgttttctctgcctggctctctcttcccctccttacctggccagtcctgtttatcatcaggccttgtcttggatatcacgtcctctgggaagtcttcttttcccctctaacctaggaccctcattaccggctctcatagcacagtctactgctttgtacgaattctaagtattcttgttgcacttaattagcctgtatatcctcagaactttgtgtaatgcctggagcatagtaggcagtcatatgttgtatcgtgaataaattgcacatagtagctacccagcaaaaaaaaaaaaaaaaaaaaaaaaaaaaaaaaaaaaaaaaaaaaaaaaaa

SEQ ID NO: 2315 - DNA, 480 bp, Homo sapiens
ggcacgagccactgcataggatattcagcagatttggctgctgtgttggccctggacagagaagcaaaatgagtgtgtgggatcccaccttttacatcctaggtgtgaacagattcaaatccactattcctccagattttatagatgaggaaaccaaggtgcacaagagggatttttttgttttgttttttgtttttgtttgtttttgagacaggattttgctttgttgcccaggctggaatgcagtggcacaaacatggctcgctgcagtctcaaactcctggccagcatgatgaaatcccatctctactgaaaatagaaaaattagctgggcgtggtggtgcacacctgtgttcccagttccttgggaggctgaggtagaagaattgcttgaatccaggaggcggaagttgcagtgagccgagatcgcgccactgtactgcagcctgggtgacagaacaagactctgtcttggaaaaa

SEQ ID NO: 2316 - DNA, 2085 bp, Homo sapiens
caccgcggtggcggccgctctagaactagtggatcccccgggctgcaggaattcggcacgagttgttccaggctaccacggaatgatgattacagctgagtttacccaaatcccaccacagggtcaaatgaaagggccttgacaagatgtcccttggcagcttgagatcgcagttgtgttgctgggttatggcctgggtgcaggctggtttgcagtgggcggtactggcagctaccatcaaggtctctgtgctgggctccagccctcagcccagaggggtggttccccactttatagagagggggtttccagctcacagaaggtgagaagcttgtcccaggcctggagcagctgtggagaaactgggagggaagcccgtccagcctgattccaagcccacatgctgctcacaggtcaaggccgagggactgatttttgccggtctgactggactcaagttacttcccagttccttgcagagagctgtctttgtgagacagtgtcttgggttctggaatgatgggagccgtgctttgcaaatgaggagtgattgcgtgctcatctggcagctggtgggtgtcctgctggcatcaggcctgagcggtgaccgtgctcctctgattgtcctcactgcgtgtgacaaggcctgggccactgtgtgagtcgtcttgcgctccatgaagcctggtgtctgtgcagatgtgtgggtggcgttagggttgggggacatttgtctttcacactggagaatgggagtctggagctggtgctactggtgaggaagaggcccggcctgctgccaggttcgcccacaccttccccctggttgttgggaaaaccaaccttggaatggccaaggcaggagatagcacctccccggtgaagatccaggagctctcatgagctccacgtggaaagatcaaggatctggagtctggagcccttcaggcagcaactcagtgaccatgaacctcagctctgtccacccggcacagcattgctgggagctggacccgggaggctgccggctccagagtgaggagggtccagaccatgcagacaatatgccctttttctccaaacaccatttcaagcaaacccgcaggtctcctccacggctgtcagcagcttctcgtagagcttctcataggactcatatggtggaatgtcgatccggttaaagctgaaaaaggacaaaagagagtcaccgtgtgggcagtccagccctaggaccaacctcaaggccaaggacaggcaagacagggaaatcgcttgaacccgggaggcagaggttgcagtgagctgagattgcgccactgccctccagcctgggtgacagagccagactctctctctcaaaaaaaaggaggtaccacaattccaagcaaacacttatctcacacattaccaccacaaataaaaatggaaatggctgtcatttattatgcatctattacgcacccatgagatgaaccaaagcatcatcagatgcaccttggcagttagaatgaaatggagatgatgggaaaaaattttaaaggaggtaacagtggagaactcaaatgaaatctcatgataggcacaacagcagaccgctcgagtgaaatctaatgaaaaccatccctcatttttaccgccaagagatttctacacctgctcattgagagcaaaatttcagtaaaaggagtaggattagtacggtgacaaagtggcatttgtcctgttcaagttttgccactgagacacagagctgtcggttaaaagagctatgtcgggggcaggcgcagtggctcatgcctataatcccagcacttcgggaggccaaggcaggcggatcacccgcagtcaggaatttgggaccagcctggccaacatggcaaaatcccatctctactaaaaatacaataattagctgggcatggtggcgggcgcctgtaatcccagctactcaggaggctgaggcaggagaatcacttgaacccaggaggtggagggtgcagtgagcagagattgtgccactgcactccagcctgggtgacagagctggactctgtctcaaaaaaaaaaaaaaaaaaaaaactcgag

SEQ ID NO: 2317 - DNA, 2025 bp, Homo sapiens
ggcacgagttgttccaggctaccacggaatgatgattacagctgagtttacccaaatcccaccacagggtcaaatgaaagggccttgacaagatgtcccttggcagcttgagatcgcagttgtgttgctgggttatggcctgggtgcaggctggtttgcagtgggcggtactggcagctaccatcaaggtctctgtgctgggctccagccctcagcccagaggggtggttccccactttatagagagggggtttccagctcacagaaggtgagaagcttgtcccaggcctggagcagctgtggagaaactgggagggaagcccgtccagcctgattccaagcccacatgctgctcacaggtcaaggccgagggactgatttttgccggtctgactggactcaagttacttcccagttccttgcagagagctgtctttgtgagacagtgtcttgggttctggaatgatgggagccgtgctttgcaaatgaggagtgattgcgtgctcatctggcagctggtgggtgtcctgctggcatcaggcctgagcggtgaccgtgctcctctgattgtcctcactgcgtgtgacaaggcctgggccactgtgtgagtcgtcttgcgctccatgaagcctggtgtctgtgcagatgtgtgggtggcgttagggttgggggacatttgtctttcacactggagaatgggagtctggagctggtgctactggtgaggaagaggcccggcctgctgccaggttcgcccacaccttccccctggttgttgggaaaaccaaccttggaatggccaaggcaggagatagcacctccccggtgaagatccaggagctctcatgagctccacgtggaaagatcaaggatctggagtctggagcccttcaggcagcaactcagtgaccatgaacctcagctctgtccacccggcacagcattgctgggagctggacccgggaggctgccggctccagagtgaggagggtccagaccatgcagacaatatgccctttttctccaaacaccatttcaagcaaacccgcaggtctcctccacggctgtcagcagcttctcgtagagcttctcataggactcatatggtggaatgtcgatccggttaaagctgaaaaaggacaaaagagagtcaccgtgtgggcagtccagccctaggaccaacctcaaggccaaggacaggcaagacagggaaatcgcttgaacccgggaggcagaggttgcagtgagctgagattgcgccactgccctccagcctgggtgacagagccagactctctctctcaaaaaaaaggaggtaccacaattccaagcaaacacttatctcacacattaccaccacaaataaaaatggaaatggctgtcatttattatgcatctattacgcacccatgagatgaaccaaagcatcatcagatgcaccttggcagttagaatgaaatggagatgatgggaaaaaattttaaaggaggtaacagtggagaactcaaatgaaatctcatgataggcacaacagcagaccgctcgagtgaaatctaatgaaaaccatccctcatttttaccgccaagagatttctacacctgctcattgagagcaaaatttcagtaaaaggagtaggattagtacggtgacaaagtggcatttgtcctgttcaagttttgccactgagacacagagctgtcggttaaaagagctatgtcgggggcaggcgcagtggctcatgcctataatcccagcacttcgggaggccaaggcaggcggatcacccgcagtcaggaatttgggaccagcctggccaacatggcaaaatcccatctctactaaaaatacaataattagctgggcatggtggcgggcgcctgtaatcccagctactcaggaggctgaggcaggagaatcacttgaacccaggaggtggagggtgcagtgagcagagattgtgccactgcactccagcctgggtgacagagctggactctgtctcaaaaaaaaaaaaaaaaaaaaaa

SEQ ID NO: 2318 - DNA, 1625 bp, Homo sapiens
aattcggcagagggacgctatatataacgtratgagcgcacggctgcggagacgcaccggagcgctcgcccagccgccgcctccaagcccctgaggtttccggggaccacaatgaacaagttgctgtgctgcgcgctcgtgtttctggacatctccattaagtggaccacccaggaaacgtttcctccaaagtaccttcattatgacgaagaaacctctcatcagctgttgtgtgacaaatgtcctcctggtacctacctaaaacaacactgtacagcaaagtggaagaccgtgtgcgccccttgccctgaccactactacacagacagctggcacaccagtgacgagtgtctatactgcagccccgtgtgcaaggagctgcagtacgtcaagcaggagtgcaatcgcacccacaaccgcgtgtgcgaatgcaaggaagggcgctaccttgagatagagttctgcttgaaacataggagctgccctcctggatttggagtggtgcaagctggaaccccagagcgaaatacagtttgcaaaagatgtccagatgggttcttctcaaatgagacgtcatctaaagcaccctgtagaaaacacacaaattgcagtgtctttggtctcctgctaactcagaaaggaaatgcaacacacgacaacatatgttccggaaacagtgaatcaactcaaaaatgtggaatagatgttaccctgtgtgaggaggcattcttcaggtttgctgttcctacaaagtttacgcctaactggcttagtgtcttggtagacaatttgcctggcaccaaagtaaacgcagagagtgtagagaggataaaacggcaacacagctcacaagaacagactttccagctgctgaagttatggaaacatcaaaacaaagaccaagatatagtcaagaagatcatccaagatattgacctctgtgaaaacagcgtgcagcggcacattggacatgctaacctcaccttcgagcagcttcgtagcttgatggaaagcttaccgggaaagaaagtgggagcagaagacattgaaaaaacaataaaggcatgcaaacccagtgaccagatcctgaagctgctcagtttgtggcgaataaaaaatggcgaccaagacaccttgaagggcctaatgcacgcactaaagcactcaaagacgtaccactttcccaaaactgtcactcagagtctaaagaagaccatcaggttccttcacagcttcacaatgtacaaattgtatcagaagttatttttagaaatgataggtaaccaggtccaatcagtaaaaataagctgcttataactggaaatggccattgagctgtttcctcacaattggcgagatcccatggatgagtaaactgtttctcaggcacttgaggctttcagtgatatctttctcattaccagtgactaattttgccacagggtactaaaagaaactatgatgtggagaaaggactaacatctcctccaataaaccccaaatggttaatccaactgtcagatctggatcgttatctactgactatattttcccttattactgcttgcagtaattcaactgraaaaaaaaaaaaaaaaactcgaggggggcccggacccaattgc

SEQ ID NO: 2319 - DNA, 821 bp, Homo sapiens
tttttttttttttttttttttttttttttttgacagcaagataaaatgaatcaattttattccaattcttcaaaatttatacgtaatatgttgtttccaaaatgtaagtcaccctttatataatagttttattatttcatctttctttgatagttttttttttcatcttttctttatggttcttcagtagaagccagaatcttgagttgcccagttaggagcctctgacctgctattctgattaagtttcttctcaatattcatggccaacatctggcttctaaaggaaaggcttttggtcttttcaatcacttgctgatagggtgagactgcattgttacccataaccacatgacctaatttagaatcaatcttggcatccagtcttgcatttctaatcaaatttacaatccacctttcagcttcttctggagtcatgttcaatttatctgccaacatgttaatgctgatacactggtggatgcgacagaaagtctcaaatatgaagagacgggcattttcaatgaaatcctcaagacaagccaccaagaagaagtcattcacaagcactgattcacattccctcagctttttctgagccccatcaaagtcaaagttaacatataaacattcaacaaattctgtaattgggtctttatatgtgtaagactcctgttgaataactttaactagatcttttagaacctgccgacgttttcgaacatccttgtttgttatgactgctgtagtcaaatagcgaagaatgtgtggacacattaagatgctgtggctggtaaaggaagagcggacgcgtgggtcga

SEQ ID NO: 2320 - DNA, 1527 bp, Homo sapiens
  misc_feature (27)..(27): n equals a,t,g, or c
  misc_feature (1515)..(1515): n equals a,t,g, or c
ttcctgcaggtatttgggccaagaatncccgsgtcgacccacgcgtccgtggcggagtacgacttgactactcgcatcgcgcactttttggatcggcatctagtctttccgcttcttgaatttctctctgtaaaggagatatataatgaaaaggaattattacaaggtaaattggaccttcttagtgataccaacatggtagactttgctatggatgtatacaaaaacctttattctgatgatattcctcatgctttgagagagaaaagaaccacagtggttgcacaactgaaacagcttcaggcagaaacagaaccaattgtgaagatgtttgaagatccagaaactacaaggcaaatgcagtcaaccagggatggtaggatgctctttgactacctggcggacaagcatggttttaggcaggaatatttagatacactctacagatatgcaaaattccagtacgaatgtgggaattactcaggagcagcagaatatctttatttttttagagtgctggttccagcaacagatagaaatgctttaagttcactctggggaaagctggcctctgaaatcttaatgcagaattgggatgcagccatggaagaccttacacggttaaaagagaccatagataataattctgtgagttctccacttcagtctcttcagcagagaacatggctcattcactggtctctgtttgttttcttcaatcaccccaaaggtcgcgataatattattgacctcttcctttatcagccacaatatcttaatgcaattcagacaatgtgtccacacattcttcgctatttgactacagcagtcataacaaacaaggatgttcgaaaacgtcggcaggttctaaaagatctagttaaagttattcaacaggagtcttacacatataaagacccaattacagaatttgttgaatgtttatatgttaactttgactttgatggggctcagaaaaagctgagggaatgtgaatcagtgcttgtgaatgacttcttcttggtggcttgtcttgaggatttcattgaaaatgcccgtctcttcatatttgagactttctgtcgcatccaccagtgtatcagcattaacatgttggcagataaattgaacatgactccagaagaagctgaaaggtggattgtaaatttgattagaaatgcaagactggatgccaagattgattctaaattaggtcatgtggttatgggtaacaatgcagtctcaccctatcagcaagtgattgaaaagaccaaaagcctttcctttagaagccagatgttggccatgaatattgagaagaaacttaatcagaatagcaggtcagaggctcctaactgggcaactcaagattctggcttctactgaagaaccataaagaaaagatgaaaaaaaaaactatcaaagaaagatgaaataataaaactattatataaagggtgacttacatttcggaacccacatattacccctccattttgaagaattggaataaanttatttcatttt

SEQ ID NO: 2321 - DNA, 2225 bp, Homo sapiens
  misc_feature (12)..(12): n equals a,t,g, or c
  misc_feature (149)..(149): n equals a,t,g, or c
ttgccagacatntaggattagcatcgcattaccatggtaatccggttttgccagtccatcaatggcgtgaaaaccggtttactcacggggatttccaaagtctccaccccattgacgtcaatggaagtttgtttkggcaccaaaatcancgggactttccaaaatgtcgtaccaactccgccccattgacgcaaatggcggtaggcgtgtacggtggaggtctatataascagagctcgtttagtgaaccgtcagatcgcctggagacgccatccacgctgttttgacctccatagaagacaccgggaccgatccagcctccggactctagcytaggccgcgggacggatamcaatttcacacaggaamcagctatgaccactaggcttttgcaaaaagctatttaggtgacactatagaaggtacgcctgcaggtaccggtccggaattcccgggtcgacccacgcgtccggactgtggtattcaagaataatgccagccgcccctactctgtgcatgctcatggagtgctagaatctactactgtctggccactggctgctgagcctggtgaggtggtcacttatcagtggaacatcccagagaggtctggccctgggcccaatgactctgcttgtgtttcctggatctattattctgcagtggatcccatcaaggacatgtatagtggcctggtggggcccttggctatctgccaaaagggcatcctggagccccatggaggacggagtgacatggatcgggaatttgcattgttgttcttgatttttgatgaaaataagtcttggtatttggaggaaaatgtggcaacccatgggtcccaggatccaggcagtattaacctacaggatgaaactttcttggagagcaataaaatgcatgcaatcaatgggaaactctatgccaaccttaggggtcttaccatgtaccaaggagaacgagtggcctggtacatgctggccatgggccaagatgtggatctacacaccatccactttcatgcagagagcttcctctatcggaatggcgagaactaccgggcagatgtggtggatctgttcccagggacttttgaggttgtggagatggtggccagcaaccctgggacatggctgatgcactgccatgtgactgaccatgtccatgctggcatggagaccctcttcactgttttttctcgaacagaacacttaagccctctcaccgtcatcaccaaagagactgaaaaagcagtgccccccagagacattgaagaaggcaatgtgaagatgctgggcatgcagatccccataaagaatgttgagatgctggcctctgttttggttgccattagtgtcacccttctgctcgttgttctggctcttggtggagtggtttggtaccaacatcgacagagaaagctacgacgcaataggaggtccatcctggatgacagcttcaagcttctgtctttcaaacagtaacatctggagcctggagatatcctcaggaagcacatctgtagtgcactcccagcaggccatggactagtcactaaccccacactcaaaggggcatgggtggtggagaagcagaaggagcaatcaagcttatctggatatttctttctttatttattttacatggaaataatatgatttcactttttctttagtttctttgctctacgtgggcacctggcactaagggagtaccttattatcctacatcgcaaatttcaacagctacattatatttccttctgacacttggaaggtattgaaatttctagaaatgtatccttctcacaaagtagagaccaagagaaaaactcattgattgggtttctacttctttcaaggactcaggaaatttcactttgaactgaggccaagtgagctgttaagataacccacacttaaactaaaggctaagaatataggcttgatgggaaattgaaggtaggctgagtattgggaatccaaattgaattttgattctccttggcagtgaactactttgaagaagtggtcaatgggttgttgctgccatgagcatgtacaacctctggagctagaagctcctcaggaaagccagttctccaagttcttaacctgtggcactgaaaggaatgttgagttacctcttcatgttttagacagcaaaccctatccattaaagtacttgttagaacactgaaaaaaaaaaaaaaaaaaaaaaaaaaa

SEQ ID NO: 2322 - DNA, 781 bp, Homo sapiens
gataaagaatgttgagatgctggcctctgttttggttgccattagtgtcacccttctgctcgttgttctggctcttggtggagtggtttggtaccaacatcgacagagaaagctacgacgcaataggaggtccatcctggatgacagcttcaagcttctgtctttcaaacagtaacatctggagcctggagatatcctcaggaagcacatctgtagtgcactcccagcaggccatggaytagtcactaaccccacaytcaaaggggcatgggtggtggagaagcagaaggagcaatcaagcttatctggatatttctttctttatttattttacatggaaataatatgatttcactttttctttagtttctttgctctacgtgggcacctggcactaagggagtaccttattatcctacatcgcaaatttcaacagctacattattgaactgaggccaagtgagctgttaagataacccacacttaaactaaaggctaagaatataggcttgatgggaaattgaaggtaggctgagtattgggaatccaaattgaattttgattctccttggcagtgaactactttgaagaagtggtcaatgggttgttgctgccatgagcatgtacaacctctggagctagaagctcctcaggaaagccagttctccaagttcttaacctgtggcactgaaaggaatgttgagttacctcttcatgttttagacagcaaaccctatccattaaagtacttgttagaacactgaaaaaaaaaaaaaaaaaa

SEQ ID NO: 2323 - DNA, 1215 bp, Homo sapiens
ggcacgagatccactttcatgcagagagcttcctctatcggaatggcgagaactaccgggcagatgtggtggatctgttcccagggacttttgaggttgtggagatggtggccagcaaccctgggacatggctgatgcactgccatgtgactgaccatgtccatgctggcatggagaccctcttcactgttttttctcgaacagaacacttaagccctctcaccgtcatcaccaaagagactgaaaaagcagtgccccccagagacattgaagaaggcaatgtgaagatgctgggcatgcagatccccataaagaatgttgagatgctggcctctgttttggttgccattagtgtcacccttctgctcgttgttctggctcttggtggagtggtttggtaccaacatcgacagagaaagctacgacgcaataggaggtccatcctggatgacagcttcaagcttctgtctttcaaacagtaacatctggagcctggagatatcctcaggaagcacatctgtagtgcactcccagcaggccatggactagtcactaaccccacactcaaaggggcatgggtggtggagaagcagaaggagcaatcaagcttatctggatatttctttctttatttattttacatggaaataatatgatttcactttttctttagtttctttgctctacgtgggcacctggcactaagggagtaccttattatcctacatcgcaaatttcaacagctacattatatttccttctgacacttggaaggtattgaaatttctagaaatgtatccttctcacaaagtagagaccaagagaaaaactcattgattgggtttctacttctttcaaggactcaggaaatttcacttttgaactgaggccaagtgagctgttaagataacccacacttaaactaaaggctaagaatataggcttgatgggaaattgaaggtaggctgagtattgggaatccaaattgaattttgattctccttggcagtgaactactttgaagaagtggtcaatgggttgttgctgccatgagcatgtacaacctctggagctagaagctcctcaggaaagccagttctccaagttcttaacctgtggcactgaaaggaatgttgagttacctcttcatgttttagacagcaaaccctatccattaaagtacttgttagaacactaaaaaaaaaaaaaaaaaaa

SEQ ID NO: 2324 - DNA, 1893 bp, Homo sapiens
tttttttacgcccgcagccgaacgaccgagcgcagcgagtcagtgagcgaggaagcggaagagcgcccaataacgcaaaccgcctctaccccgcgcgttggccgattcattaatgcagctggcacgacaggtttcccgactggaaagcgggcagtgagcgcaacgcaattaatgtgagttagctcactcattaggcaccccaggctttacactttatgcttccggytcgtatgttgtgtggaattgtgagcggataacaatttcacacaggaaacagctatgaccatgattacgccaagctcgaaattaaccctcactaaagggaacaaaagctggagctccaccgcggtggcggccgctctagaactagtggatcccccgggctgcaggaattcggcacgaggagcggcgctcggcgaactgtgtggaccgtctgctgggactccggccctgcgtccgctcagccccgtggccccgcgcacctactgccatggagacgcggcctcgtctcggggccacctgtttgctgggcttcagtttcctgctcctcgtcatctcttctgatggacataatgggcttggaaagggttttggagatcatattcattggaggacactggaagatgggaagaaagaagcagctgccagtggactgcccctgatggtgattattcataaatcctggtgtggagcttgcaaagctctaaagcccaaatttgcagaatctacggaaatttcagaactctcccataattttgttatggtaaatcttgaggatgaagaggaacccaaagatgaagatttcagccctgacgggggttatattccacgaatcctttttctggatcccagtggcaaggtgcatcctgaaatcatcaatgagaatggaaaccccagctacaagtatttttatgtcagtgccgagcaagttgttcaggggatgaaggaagctcaggaaaggctgacgggtgatgccttcagaaagaaacatcttgaagatgaattgtaacatgaatgtgccccttctttcatcagagttagtgttctggaaggaaagcagcagggaagggaatattgaggaatcatctagaacaattaagccgaccaggaaacctcattcctacctacactggaaggagcgctctcactgtggaagagttctgctaacagaagctggtctgcatgtttgtggatccagcggagagtggcagactttcttctccttttccctctcacctaaatgtcaacttgtcattgaatgtaaagaatgaaaccttctgacacaaaacttgagccacttggatgtttactcctcgcacttaagtatttgagtcttttcccatttcctcccactttactcaccttagtggtgaaaggagactagtagcatcttttctacaacgttaaaattgcagaagtagcttatcattaaaaaacaacaacaacaacaataacaataaatcctaagtgtaaatcagttattctaccccctaccaaggatatcagcctgttttttcccttttttctcctgggaataattgtgggcttcttcccaaatttctacagcctctttcctcttctcatgcttgagcttccctgtttgcacgcatgcgtgtgcaggactggctgtgtgcttggactcggctccaggtggaagcatgctttcccttgttactgttggagaaactcaaaccttcaagccctaggtgtagccattttgtcaagtcatcaactgtatttttgtactggcattaacaaaaaaagagataaaatattgtaccattaaactttaataaaactttaaaaggaaaaaaaaaaaaaaaaaaaaaaaaaaaaaaaaaaaaaaaaactcgagggggggcccggtacccaatcgccctgatgagtgatcgt

SEQ ID NO: 2325 - DNA, 380 bp, Homo sapiens
  misc_feature (7)..(7): n equals a,t,g, or c
  misc_feature (48)..(48): n equals a,t,g, or c
  misc_feature (58)..(58): n equals a,t,g, or c
gttaaancagtaattttccccccattgaaagagatcaccctatttctnccccttttcncctgggaaaaaycttgggcttcttcctgaatcctggwaacttccatcctcttctcctgcttgggcttccctgtttgcacgcatgtgtatgcaggaatggctgtgtgtttggactcagccccagctggaagcatgctttcccctggtactgttacagaaacagaaaccttcaagccctaggtggagccatttttgtcaagtcgtcaactgtatttttgtactgaggttaacaaaaaaatttagaaatactaattgttccattaaactttaataaaactttgaaagaaaaaaaaaaaaaaaaaaaaaaaaaaaagggcggccgc

SEQ ID NO: 2326 - DNA, 1022 bp, Homo sapiens
  misc_feature (34)..(36): n equals a,t,g, or c
  misc_feature (43)..(43): n equals a,t,g, or c
ctctttgtagtccctcttctgatggacatattgnnntactttnctggttttggagatcacattcattggaggacactagaggatgggaagaaggaagcagctgccagtgggttgcctctgatggtgattatccacaagtcctggtgtggagcttgcaaagctttgaagcccaaatttgccgagtctacagaaatttcagaactttcccataattttgttatggtgaatcttgaggatgaagaggagcccaaggatgaagatttcagccctgatgggggttatattccacgaatccttttcttggatcccagtggcaaggtccatcctgaaatcatcaatgagaatggaaaccccagctacaagtatttctacatcagtgccgagcaagttgttcaggggatgaaggaagctcaggagaggctgacgggagatgccttcagagagaaacatcttgaagatgagttataacatgaatatatcctttctttcatcagagttagtgctctggaaggaaagcagcaggggagggaatattgaggattcgctcagaacaattaaaccaaccaggaaaccttgctcctgcctacatggggaggagcgctctcactgtggaagacttctgctgacaggagctggtctccacgcttgtggatccagcagagtgtggcagacttccttcttccgcctcctcctaggtgtccgtcactgaacgtgaatgacagcttttgacacaaaacttgagccatttggagttgtactcctcacagttcagtatttgaatttttttccgtttcctcctgctttattcaccttggtggtgaaaggagaccagtagcatcttttctacggtattaaaattacagaaatagttcaccatttaaaaaaaaaaaaacctaaaggtaaaacagtaattctacccccactgaagagatcagcctatttcttctccttttctcctgggaataatcttgggcttcttcctgaatcctggtaacttccatcctcttctcctgcttgggctt

SEQ ID NO: 2327 - DNA, 2363 bp, Homo sapiens
  misc_feature (2225)..(2225): n equals a,t,g, or c
gtctttggctttttttggcggagctggggcgccctccggaagcktttccaactttccagaagtttctcggsacgggcgggaggaggggaacgccatatatagacctggagagccgggagcgcggagagtggaatcggtccgcggctcgagtgggtctctagtccggcgccagcccgcccggcccagccctcacaggtccttcgtggtgcataccatccgcctcccagccatgcgcttcctcctgcttaccagcacttgctgcctcctggccatggccctggctgccgaggtgaagaagccagcggccccaggcacagcagagaagctgagccccaaagcggccacgctggcagagcgcagtgctggcctggccttcagcctgtaccaggccatggccaaggaccaggcggtggagaacatcctgctgtcgcctgtggtggtggcctcatccctggggcttgtgtcgctggggggcaaggccaccacagcgtcccaggccaaggcggtgctgagtgcagagcagctgcgtgatgaggaggtgcacgcgggcctgggcgagctgytgcgagcyttcagcaacagcacggcgcgcaacgtgacctggaagctgggcagccgcctgtatgggcccagctcggtgagcttcgcggaggactttgtgcgcagcagcaagcagcactacaactgcgagcactccaagatcaacttccgcgacaagcgcagcgccctgcagtccatcaatgagtgggccgcacagaccaccgatggcaagctgcctgaggtcaccaaggacgtggagcggacggatggcgcgctgctggtcaacgccatgttcttcaagccgcactgggacgagaagttccaccacaagatggtggacaaccgaggcttcatggtgacccgctcgtataccgttggggttacgatgatgcaccgcacaggactctacaactactacgacgacgagaaggagaagctgcagatggtggagatgcccctggcccacaagctgtccagcctcctcatcctcatgccgcaccacgtggagcccctggagcgcctggagaagcttctgaccaaggagcagctgaagatctggatggggaagatgcagaagaaagccgtcgccatctccttgcccaagggggtggtagaggtgacccacgacctgcagaaacacctggctggactgggtctgactgaggccatcgacaagaacaaggcagacctgtcacgcatgtcaggcaagaaggacctgtacctggccagcgtgttccacgctaccgccttcgagtgggacacagagggcaacccctttgaccaggacatctacgggcgtgaggagctgcgcagtcccaagytcttctacgctgaccaccccttcattttcctggttcgagacacccagaccggctccctgctgttcattgggcgcctggtccggcccaagggtgacaagatgcgagatgagctgtagggccccagggatggcaggaggcagcccaaggctcctgagacacatgggtgctatggggggtagctgaggtaccgaccttggatgtgccatggggtgggggtgggaaaacagagcaggcttcctggatgtctgagcagatcttcccaggcagaattgactctgtctggatgtgggcccccagataccgtgatgctgagcccggacaccccacattctgagggccctggggcagttggcgtgtcttgccttcagcatcctgggattaagcctgcctcaatcagtgttcatatttatagccaagtgctttctcatctgtgagacagaatcgagctagggggcttcagcccagccctgtggaatggggaccctcttttccttaccctaccatcacctcagccctctctccagctctattccagtcctctcccaattcccctctaaaataatgaggtgctgcagccctgggataagcacccccacgatggccctggccccagagagagggatcaggaacctgctcatggtggggggcactcatgggcagactctgatcaggcatcatggggatgaactttttttctccttttgtagatgttcaaaggtggggagggcagggggaaaatgagcctttgttgctgtcaaaccaagaacttatttgtacaatttctttttcaataaaacttttccagtgaaaaaaaaaaaaaaaaaaagggcggccgctctagaggatccctcgaggggcccaarnttacgcgtgcatgcgacgtcatagctctctccctatagtgagtcgkattataagctaggcactggccgtcgttttacaacgtcgtgactgggaaaactgctagcttgggatctttgtgaaggaaccttacttctgggg

SEQ ID NO: 2328 - DNA, 606 bp, Homo sapiens; identical to SEQ ID NO: 1575

SEQ ID NO: 2329 - DNA, 718 bp, Homo sapiens
  misc_feature (625)..(625): n equals a,t,g, or c
  misc_feature (639)..(639): n equals a,t,g, or c
  misc_feature (644)..(644): n equals a,t,g, or c
  misc_feature (717)..(717): n equals a,t,g, or c
tcgacccacgcgtccgggactttggctccatctctacaaaagggccctctgtgagtcagcctgctcccctccaggcttgctcctcccccatccagctcctgtttccgatgcacgtacagcccgtacacaccgtgtctgggacaccccacaagtcagccacatggctcccctgtgccccagamcctggctccctctgtcgatcccagccctttctccaggccctgccctgcaactgctgcttgcactgctgctcctggtgcctgcccatgcccagagcctgtcccgtatacaggggacgcctgagttgggaggagattcatctggggaagatgatcaactggacggggaaaagctacccagtgaagaggacctacccagagaggacccacccggagacgaggacctactgggagagcaggacccatctggaatgaagactgaaccaggaaaagaggactctctgaagttagaggatctgcctactgttgaggcacccagggacccccaaggctcccagaataatgactacaggcacaacaaaggggatgaccacagtcattggcgcttatggargcgacccgccctggcctcargtgtycccagctgcgcaggcgcttccaatcgncggtagatatccanccagngctcgccgcattctgccgggctctgcaaccccccgaaatcctgggcttttaagctcccgaaactcccagaatng

SEQ ID NO: 2330 - DNA, 508 bp, Homo sapiens
  misc_feature (439)..(439): n equals a,t,g, or c
  misc_feature (498)..(498): n equals a,t,g, or c
tcgacccacgcgtccggatctgcggtggcagcgtgcggccgaggcggtggaggccgaggctgtgatggcggcgacggcagcggttcgggcgcaggcggggacgcggcaggccccagcactctggcaaatgcggtggctgccactgttgctgatggcggtggcggcggcggagcagcaggtgccgctggtgctgtggtcgagtgaccgggacttgtggggtcctgcggccaacacccacgagggccacatcaccagcgacttgcagctgtctacctacttagaccccgccctggagctgggccctcggaatgtgctgctgttcctgcaggacaagctgagcattgaggacttcacagcctatggtggcgtgtttggaaacaagcaggacagcgccttttcaaacctggagaatgccctggacctggccccttcctctctngtgctccctgctgtggactggtacgcggccagcactctgagcacgtactgcaggagaanctcgggggca

SEQ ID NO: 2331 - DNA, 1772 bp, Homo sapiens
tcgacccacgcgtccgggagagaacgccggtggcggggctggtagcccggcagccgcaggtggggccacgagcgctggctgagggaccgagccggagagccccggagcccccgtaacccgcgcggggagcgcccaggatgccgcgcggggactcggagcaggtgcgctactgcgcgcgcttctcctacctctggctcaagttttcacttatcatctattccaccgtgttctggctgattggggccctggtcctgtctgtgggcatctatgcagaggttgagcggcagaaatataaaacccttgaaagtgccttcctggctccagccatcatcctcatcctcctgggcgtcgtcatgttcatggtctccttcattggtgtgctggcgtccctccgtgacaacctgtaccttctccaagcattcatgtacatccttgggatctgcctcatcatggagctcattggtggcgtggtggccttgaccttccggaaccagaccattgacttcctgaacgacaacattcgaagaggaattgagaactactatgatgatctggacttcaaaaacatcatggactttgttcagaaaaagttcaagtgctgtggcggggaggactaccgagattggagcaagaatcagtaccacgactgcagtgcccctggacccctggcctgtggggtgccctacacctgctgcatcaggaacacgacagaagttgtcaacaccatgtgtggctacaaaactatcgacaaggagcgtttcagtgtgcaggatgtcatctacgtgcggggctgcaccaacgccgtgatcatctggttcatggacaactacaccatcatggcgggcatcctcctgggcatcctgcttccccagttcctgggggtgctgctgacgctgctgtacatcacccgggtggaggacatcatcatggagcactctgtcactgatgggctcctggggcccggtgccaagcccagcgtggaggcggcaggcacgggatgctgcttgtgctaccccaattagggcccagcctgccatggcagctccaacaaggaccgtctgggatagcacctctcagtcaacatcgtggggctggacagggctgcggcccctctgcccacactcagtactgaccaaagccagggctgtgtgtgcctgtgtgtaggtcccacggcctctgcctccccagggagcagagcctgggcctcccctaagaggctttccccgaggcagctctggaatctgtgcccacctggggcctggggaacaaggccctcctttctccaggcctgggctacrggggagggagagcctgaggctctgctcagggcccatttcatctctggcagtgccttggcggtggtattcaaggcagttttgtagcacctgtaattggggagagggagtgtgcccctcggggcaggagggaagggcatctggggaagggcaggagggaagagctgtccatgcagccacgcccatggccaggttggcctcttctcagcctcccaggtgccttgagccctcttgcaagggcggctgcttccttgagcctagtttttttacgtgatttttgtaacattcatttttttgtacagataacaggagtttctgactaatcaaagctggtatttccccgcatgtcttattcttgcccttcccccaaccagtttgttaatcaaacaataaaaacatgttttkttttktttttaaaaaaaaaaaaaaaaaaaaaaaaaaaaaaaaaaaaaaaaaaaaaaaaaaaagggcggccgc

SEQ ID NO: 2332 - DNA, 1504 bp, Homo sapiens
gcttcccttaagctatttaggtgacactatagaaggtacgcctgcaggtaccggtccggaattcccgggtcgacccacgcgtccgcccacgcgtccgagaaaaatgctgctcagtttttattgtctaccaatggtaagtatacatattttctttccatgtgcccactgtgtgtacctgttgcacatatcctgtagcctaggagaggaatcatttaacagagatacttgtaaaaaggacttttgtttttctatacagaatgtaaactctacttttttactgtcacttgcagtttttagattctctgaaagattctctgatagcaattttttgkttactacacctccaatttgtagtgaaaagaatgggctgctataccattggatttaggtcaggtactatttctgtcatttctcagtctcgtaatcttgggcaggttactaacactgaattgaattttcctcagcagcaaactagagatagcaattttttattatagtattattatgaatattaaataacttcacatacatcatgagtgcaagtgctcaataaatgttaatttattcctcctttttaagtgtttgtaaactacacagagtatctcaaactgcagatacaaaatactcaaaggatggtctccattccaggatacgctataggagagcactttcttacttgatcaccattagcatattgccttcttcccagcaatccacatggctggaaggagattcctctcctactgtttacttgccaagggaacattttttgttgttttttgagacaatgtctgtcgcccaggctgaagtgcattggtgtaatcacagctcactgcagcctcgacctccctacctcagtctcctgagtagctgggaccacaggtgagtgccaccacacccggctaattttttaaaaacatttttgtagagcctgggtaacatggggtggaacaagcctgtagtcccagatactcaggaggctgaggtgaaaggattgcttgggccagggaggtcaaggctgcagtgagccgtgaaaggccactgcaytccagcctgggtgacagaatgagaccttgtctcaaaaaaaaaaaaaaagtttcttggaacctatacgtttttttttgttttttttttgaaaagccagaccttgtgcccttgttttgaacaccgactgggaagatggggcttaggtaacagccaaacctggctgtcagctgtgtgggagccaccaccctctctgggaagagttcctgcttctgtatggcaagcataaatcaagctcagtctgggttatggagaagttgaaaattgttttgttcctcattagtttataattgtatgaaatacgattttaatgaaaacttttcagaattcacgtttgtgtagatatttcagagaaccatttttactttacatcctaaaactgccttttcctatggttttgtcaataaaacactatgatgttgaaaaaaaaaaaaaaaaaaaaaaaaaaaagggcggccgc

SEQ ID NO: 2333 - DNA, 1739 bp, Homo sapiens
cgggtcgacccacgcgtccggtcccggagcgcgcgagggtggcggggcgcgcggccgggctggcagccgcaggtggggctgttgtaggcgagggacctagcccgggagccccggagccccggagccccgcggagagtgcccaggatgccccgcggggactccgagcaggtgcgctactgcgcgcgcctctcctacctctggctcaagttctcgctggtcgtctactccacggtgttctggctgatcggagccctagtcctctcagtgggcatctatgcggaggtggagaggcagaaatataaaacccttgaaagtgcctttctggccccagccatcatcctcatcctcctgggggtcatcatgttcatcgtctccttcattggcgtgctggcttccctccgtgacaacctgtgccttctccaagcgttcatgtacatccttgggatttgcctcataattgagctcatcggtggcgtggtagccttgatcttccggaaccagaccatcgactttctgaatgacaacattcgaagaggaatcgagaactactatgacgatctggacttcaaaaacatcatggactttgttcagaagaagttcaagtgctgtggcggggaagactaccgggattggagcaaaaaccagtaccatgactgcaatgccccgggacccctggcctgcggggttccctacacctgctgcgtcagaaacacgacagaagtggtcaacaccatgtgcggctacaaaaccattgacaaggagcggctcagcgtgcaggacgtcatctacgtgcggggctgcaccaacgccgtgctcatctggttcatggacaactataccatcatggcgggcctcctgctgggcatcctgctcccccagtttctgggggtgctgctgacattcctgtacatcacccgggtggaggacatcatcatggagcactctgtcaccgacggacttctggggccaggcgccaagcccagcgtggaggcggcaggcacggggtgctgcatgtgctaccccaattagcgcccctgtccggacggtgccaggaccacaccgctcgggcctctgcgcaggggccggaagggactgtggatattctccctacacattggccggaaccacggctgtgttggctctggtggcctgttcaggcctcccacagccactgcctctctggggagtggagcccctccccagctctgaggtcctgtgcctgcccaccctctttggcatggggatcaagggcaccccttctccaggccaggccgctggggaagggggtgctcattgctcagctcagggcccgtttcatttctggcaatgccatggcctgtggtgtttatgcccctttgagggtaattttgtagtaatgcataagcgaggacggaagagaccatatgtgctgtgtagggaagggtgtgtgtgtggccccttcagggccctggagcccctcagccacaccccagaggccaagttgggcccatctcacagcctcccagggaccttgagcccaccccaagactgctgctttgctgaccctgttttctacctgatttttgtaacattcattttgtacacagttaacaggagtttctgactaatcaaagctgggtggttcggcgcacaccccactcttgcctctccaagtcagtttattaatcaagcaataaagacatgattttttattaaaaaaaaaaaaaaaaaaaaaaaaaaaaaaaaaaaaaaaaaaaggg

SEQ ID NO: 2334 - DNA, 750 bp, Homo sapiens
  misc_feature (732)..(732): n equals a,t,g, or c
tccatgggtctgcaagacttttgctccgtccagtgccaaagccttagcagatcctggcatggatgcctcaggctgatggcaccggccttgcaatgagacgagaacccaaagctcagttatcagtgtcctgtcttgctgctatgagctttttgtactgataacgaccatttctttactgagcgccttctgggttctggcagcatcctcggcacccacattatataatttaaccgtcacaacggccagcccaggggtgctgctataccacttcacagagaggaaactggctctcagaggcttcagagcctgtccccagcttcaggtgtggctccctgagttgggggcttcctaggtgaggtcacgaggaaacctgctggccaagtgacctggcagggtgtggccagtgtggccagggccgccgagcctgctttccttccctgcagcaggaacccttctggggctgtgatcctgcgatggtgcctgggtgggagtgggggtggggggcgggatggtctccctacctgccagcttcttggtttgaggtgaggacagccccggaagctcagacttggctcctgtccatgtacttggggccatgagctctgcagggaccttggaaagagagagacgggtggtgtagggcaggggaaggcattgtcttcaaacaggaaaaagctgagaatggaaacaggcgaaacttaccaagtgtaacatcacctggaactgaagganggtgggaagggtttaatt

SEQ ID NO: 2335 - DNA, 1414 bp, Homo sapiens
gcgtccgcccacgcgtccgagaaaaatgctgctcagtttttattgtctaccaatggtaagtatacatattttctttccatgtgcccactgtgtgtacctgttgcacatatcctgtagcctaggagaggaatcatttaacagagatacttgtaaaaaggacttttgtttttctatacagaatgtaaactctacttttttactgtcacttgcagtttttagattctctgaaagattctctgatagcaattttttgtttactacacctccaatttgtagtgaaaagaatgggctgctatacattggatttaggtcaggtactatttctgtcattctcagtctcgtaatcttgggcaggttactaacactgaattgaattttcctcagcagcaaactagagatagcaattttttattatagtattattatgaatattaaataacttcacatacatcatgagtgcaagtgctcaataaatgttaatttattcctcctttttaagtgtttgtaaactacacagagtatctcaaactgcagatacaaaatactcaaaggatggtctccattccaggatacgctataggagagcactttcttacttgatcaccattagcatattgccttcttcccagcaatccacatggctggaaggagattcctctcctactgtttacttgccaagggaacattttttgttgttttttgagacaatgtctgtcgcccaggctgaagtgcattggtgtaatcacagctcactgcagcctcgacctccctacctcagtctcctgagtagctgggaccacaggtgagtgccaccacacccggctaattttttaaaaacatttttgtagagcctgggtaacatggggtggaacaagcctgtagtcccagatactcaggaggctgaggtgaaaggattgcttgggccagggaggtcaaggctgcagtgagccgtgaaaggccactgcactccagcctgggtgacagaatgagaccttgtctcaaaaaaaaaaaaaaagtttcttggaacctatacgtttttttttgttttttttttgaaaagccagaccttgtgcccttgttttgaacaccgactgggaagatggggcttaggtaacagccaaacctggctgtcagctgtgtgggagccaccaccctctctgggaagagttcctgcttctgtatggcaagcataaatcaagctcagtctgggttatggagaagttgaaaattgttttgttcctcattagtttataattgtatgaaatacgattttaatgaaaacttttcagaattcacgtttgtgtagatatttcagagaaccatttttactttacatcctaaaactgccttttcctatggttttgtcaataaaacactatgatgttgaaaaaaaaaaaaaaaaaaaaaaaaaaaa

SEQ ID NO: 2336 - DNA, 2410 bp, Homo sapiens
gaattcccgggtcgacccacgcgtccgcttaccgctgcttgctggagcgagcttccacttaactcccgtcccggtccccgcgcgccatgtgcctcctcggcgggctgagcgccccgccgctgctgctgctgccgctgctgccgctgctgctgtgtccgcctacggcgcagggtgactgcagctttcccccagagctacctaatgccatacaaagtgtgggtgaccaacagagttttcctgaaaaattcacagtaacatacaaatgtaaagaaggctttgtaaaggttcctggcaaggcagactccgtggtctgtctcaacaataaatggtcagaggtggcagaattttgtaaccgtagctgtgatgttccaaccaggctacaatttgcatctctcaaaaagtctttcaccaaacagaattatttcccagtgggttccgttgtggaatatgaatgccgacctggctaccaaagggaccatcttctctcaggaaaactaacttgccttctgaattttacatggtccaaacccgatgaattttgtaaaagaaaatcatgtcctaatcctggagatttaagacatggtcatgtcaacattccaactgacatattgtatgctgcagttatccacttctcgtgtaacaaggggtacaggttagtcggtgcagcttctagttactgttccattgtaaatgacgatgttggctggagtgatccattgcctgaatgccaagaaattttttgtccggaaccaccaaaaattagcaatggagtcattctagatcaacagaacacttatgtgtatcaacaggctgtaaaatatgagtgtataaaaggcttcaccctgatcggagagaactctatttattgtactgttaagggtgaccaaggagaatggagtggcccgccgcctgaatgcaaaggttctcagatttctacagtcataccagcaacagagacacccaccacagtaagtgcttcagctacaaagcccacatcagctcctcagaaacccaccactgcaaatgttacaggtaccaaagttacatcagctcctcagaaacccaccacagggaatgttccaggtaccgaagctacatcaactcctcagaaacccactacagcggatgtttcagagaccccgtcagcagtccagaatcccatcacggcaaatgcgtctgctacacaggccatgccagcaacccatagatcctccacagcaaaagcttcatttacacagagtcttccagcaacacgaaagtccactgctatacatgccccagtgactaagggtctccatacaacaaaaagattgacctctgctcgtattacagcaaaacagagttcagctactcccaggacaaccagcgcacctcatggaagagggaccctctcttcagatgctgccatcattgcagttggtaagtttggttcttcggcagttaaaaaaaattgtcatcactgtgggatgtacaatccttattcctggaggagaatattgtctttttactgccttaggaatactattaagatgaaatgtttaaggtcagggagaagacgggtaaatgcattttatcgacgtgtttggtggaccccgttaggtactcggtacgttcctaagtcttcccaaccgtgttcttgttccaaggtaattttagggcaacttcacatcatttggccagtcaatcaagtatccctgaacgcgtattgtctcaatgcattatcattctaggggccaaaaacaacaataaggaagctattatcaatacagtttttaagcctcaagtgttttacaagtactcacaaactactccttggttgtttttagacgtctgttccagataaaccagaatgctacttttgattaacatcctgttcttttttccctttcctgtcagtgatttaaagcaaagatagctttaaaattattctgttgctatagacttaaggacatatctatgttgcaaatttctttttcttgttcccagtcttttgttgttcattaaatatattatttgatgttatacattttaccaagaagattaataactcctaaagaagatggcaaaagaaatgtttaagaagcaatacagctaagttggcatattaaaaaggaatgcccagtagaaaatatgcacattaaaaagtgaatattttaaaattatgtccttataagctgaggtctcctatttatgcatgcatgagtgaaacaagggactgaagctgaaaaggtgttttttaattattattattatttatagttcttttatagttcttttatattttgaatgaacctctccttagctaaaatagttatcttgaaagatttgaacagttggattcactttgtttgtttgatattttcaatagaaataaatgcattctaaatgaaaaaaaaaaaaaaaaaaaaaa

SEQ ID NO: 2337 - DNA, 2464 bp, Homo sapiens
  misc_feature (7)..(7): n equals a,t,g, or c
  misc_feature (9)..(9): n equals a,t,g, or c
  misc_feature (1049)..(1049): n equals a,t,g, or c
  misc_feature (2030)..(2030): n equals a,t,g, or c
  misc_feature (2157)..(2157): n equals a,t,g, or c
gaacgantnggtgacactatagaaggtacgcctgcaggtaccggtccggaattcccgggtcgacccacgcgtccgcttaccgctgcttgctggagcgagcttccacttaactcccgtcccggtccccgcgcgccatgtgcctcctcggcgggctgagcgccccgccgctgctgctgctgccgctgctgccgctgctgctgtgtccgcctacggcgcagggtgactgcagctttcccccagagctacctaatgccatacaaagtgtgggtgaccaacagagttttcctgaaaaattcacagtaacatacaaatgtaaagaaggctttgtaaaggttcctggcaaggcagactccgtggtctgtctcaacaataaatggtcagaggtggcagaattttgtaaccgtagctgtgatgttccaaccaggctacaatttgcatctctcaaaaagtctttcaccaaacagaattatttcccagtgggttccgttgtggaatatgaatgccgacctggctaccaaagggaccatcttctctcaggaaaactaacttgccttctgaattttacatggtccaaacccgatgaattttgtaaaagaaaatcatgtcctaatcctggagatttaagacatggtcatgtcaacattccaactgacatattgtatgctgcagttatccacttctcgtgtaacaaggggtacaggttagtcggtgcagcttctagttactgttccattgtaaatgacgatgttggctggagtgatccattgcctgaatgccaagaaattttttgtccggaaccaccaaaaattagcaatggagtcattctagatcaacagaacacttatgtgtatcaacaggctgtwaaatatgagtgtataaaaggcttcaccctgatcggagagaactctatttattgtactgttaagggtgaccaaggagaatggagtggccgccgcctgaatgcaaaggttctcagatttctacagtcataccagcaacagagacaccaccacagtaagtgcttcagctacaaagcccacatcagctcntcagaaacccaccactgcaaatgttacaggtaccaaagttacatcagctcctcagaaacccaccacagggaatgttccaggtaccgaagctacatcaactcctcagaaacccactacagcggatgtttcagagaccccgtcagcagtccagaatcccatcacggcaaatgcgtytgctacacaggccatgccagcaacccatagatcctccacagcaaaagcttcatttacacagagtcttccagcaacacgaaagtccactgctatacatgccccagtgactaagggtctccatacaacaaaaagattgacctctgctcgtattacagcaaaacagagttcagctactcccaggacaaccagcgcacctcatggaagagggaccctctcttcagatgctgccatcattgcagttggtaagtttggttcttcggcagttaaaaaaaattgtcatcactgtgggatgtacaatccttattcctggaggagaatattgtctttttactgccttaggaatactattaagatgaaatgtttaaggtcagggagaagacgggtaaatgcattttatcgacgtgtttggtggaccccgttaggtactcggtacgttcctaagtcttcccaaccgtgttcttgttccaaggtaattttagggcaacttcacatcatttggccagtcaatcaagtatccctgaacgcctattgtctcaatgcattatcattctaggggccaaaaacaacmataaggaagctattatcaatacagtttttaagcctcaagtgktttacaagtactcacaaactactccttggttgkttctagacgtctgttccagataaaccagaatgctacytttgattacatcctgttcttttttccctttcctgtcagtgatttaaagcaaagatagctttaaaattattctgttgctatagacttaaggacatatctatgttgcaaatttctttttcttgttcccnagtcttttgttgttcattaaatatattatttgatgttatacattttaccaagaagattaataactcctaaagaagatggcaaaagaaatgtttaagaagcaatacagctaagttggcatattaaaanggaatgcccagtagaaaatatgcacattaaaaagtgaatattttaaaattatgtccttataagctgaggtctcctatttatgcatgcatgagtgaaacaagggactgaagctgaaaaggtgttttttaattattattattatttatagttcttttatagttcttttatattttgaatgaacctctccttagctaaaatagttatcttgaaagatttgaacagttggattcactttgtttgtttgatattttcaatagaaataaatgcattctaaatgaaaaaaaaaaaaaaaaaaaaaagggcggcc

SEQ ID NO: 2338 - DNA, 2393 bp, Homo sapiens
ccacgcgtccgcttaccgctgcttgctggagcgagcttccacttaactcccgtcccggtccccgcgcgccatgtgcctcctcggcgggctgagcgccccgccgctgctgctgctgccgctgctgccgctgctgctgtgtccgcctacggcgcagggtgactgcagctttcccccagagctacctaatgccatacaaagtgtgggtgaccaacagagttttcctgaaaaattcacagtaacatacaaatgtaaagaaggctttgtaaaggttcctggcaaggcagactccgtggtctgtctcaacaataaatggtcagaggtggcagaattttgtaaccgtagctgtgatgttccaaccaggctacaatttgcatctctcaaaaagtctttcaccaaacagaattatttcccagtgggttccgttgtggaatatgaatgccgacctggctaccaaagggaccatcttctctcaggaaaactaacttgccttctgaattttacatggtccaaacccgatgaattttgtaaaagaaaatcatgtcctaatcctggagatttaagacatggtcatgtcaacattccaactgacatattgtatgctgcagttatccacttctcgtgtaacaaggggtacaggttagtcggtgcagcttctagttactgttccattgtaaatgacgatgttggctggagtgatccattgcctgaatgccaagaaattttttgtccggaaccaccaaaaattagcaatggagtcattctagatcaacagaacacttatgtgtatcaacaggctgtaaaatatgagtgtataaaaggcttcaccctgatcggagagaactctatttattgtactgttaagggtgaccaaggagaatggagtggcccgccgcctgaatgcaaaggttctcagatttctacagtcataccagcaacagagacacccaccacagtaagtgcttcagctacaaagcccacatcagctcctcagaaacccaccactgcaaatgttacaggtaccaaagttacatcagctcctcagaaacccaccacagggaatgttccaggtaccgaagctacatcaactcctcagaaacccactacagcggatgtttcagagaccccgtcagcagtccagaatcccatcacggcaaatgcgtctgctacacaggccatgccagcaacccatagatcctccacagcaaaagcttcatttacacagagtcttccagcaacacgaaagtccactgctatacatgccccagtgactaagggtctccatacaacaaaaagattgacctctgctcgtattacagcaaaacagagttcagctactcccaggacaaccagcgcacctcatggaagagggaccctctcttcagatgctgccatcattgcagttggtaagtttggttcttcggcagttaaaaaaaattgtcatcactgtgggatgtacaatccttattcctggaggagaatattgtctttttactgccttaggaatactattaagatgaaatgtttaaggtcagggagaagacgggtaaatgcattttatcgacgtgtttggtggaccccgttaggtactcggtacgttcctaagtcttcccaaccgtgttcttgttccaaggtaattttagggcaacttcacatcatttggccagtcaatcaagtatccctgaacgcctattgtctcaatgcattatcattctaggggccaaaaacaacaataaggaagctattatcaatacagtttttaagcctcaagtgttttacaagtactcacaaactactcttggttgtttctagacgtctgttccagataaaccagaatgctacctttgattaccatcctgttcttttttccctttcctgtcagtgatttaaagcaaagatagctttaaaattattctgttgctatagacttaaggacatatctatgttgcaaatttctttttcttgttcccagtcttttgttgttcattaaatatattatttgatgttatacattttaccaagaagattaataactcctaaagaagatggcaaaagaaatgtttaagaagcaatacagctaagttggcatattaaaaaggaatgcccagtagaaaatatgcacattaaaaagtgaatattttaaaattatgtccttataagctgaggtctcctatttatgcatgcatgagtgaaacaagggactgaagctgaaaaggtgttttttaattattattattatttatagttcttttatagttcttttatattttgaatgaacctctccttagctaaaatagttatcttgaaagatttgaacagttggattcactttgtttgtttgatattttcaatagaaataaatgcattctaaatgaaaaaaaaaaaaaaaaaaaaaa

SEQ ID NO: 2339 - DNA, 2393 bp, Homo sapiens; identical to SEQ ID NO: 2338

SEQ ID NO: 2340 - DNA, 2383 bp, Homo sapiens
ccacgcgtccgcttaccgctgcttgctggagcgagcttccacttaactcccgtcccggtccccgcgcgccatgtgcctcctcggcgggctgagcgccccgccgctgctgctgctgccgctgctgccgctgctgctgtgtccgcctacgggcagggtgactgcagctttcccccagagctacctaatgccatacaaagtgtgggtgaccaacagagttttcctgaaaaattcacagtaacatacaaatgtaaagaaggctttgtaaaggttcctggcaaggcagactccgtggtctgtctcaacaataaatggtcagaggtggcagaattttgtaaccgtagctgtgatgttccaaccaggctacaatttgcatctctcaaaaagtctttcaccaaacagaattatttcccagtgggttccgttgtggaatatgaatgccgacctggctaccaaagggaccatcttctctcaggaaaactaacttgccttctgaattttacatggtccaaacccgatgaattttgtaaaagaaaatcatgtcctaatcctggagatttaagacatggtcatgtcaacattccaactgacatattgtatgctgcagttatccacttctcgtgtaacaaggggtacaggttagtcggtgcagcttctagttactgttccattgtaaatgacgatgttggctggagtgatccattgcctgaatgccaagaaattttttgtccggaaccaccaaaaattagcaatggagtcattctagatcaacagaacacttatgtgtatcaacaggctgtaaaatatgagtgtataaaaggcttcaccctgatcggagagaactctatttattgtactgttaagggtgaccaaggagaatggagtggccgccgcctgaatgcaaaggttctcagatttctacagtcataccagcaacagagacaccaccacagtaagtgcttcagctacaaagccacatcagctctcagaaacccaccactgcaaatgttacaggtaccaaagttacatcagctctcagaaacccaccacagggaatgttccaggtaccgaagctacatcaactcctcagaaacccactacagcggatgtttcagagaccccgtcagcagtccagaatcccatcacggcaaatgcgtttgctacacaggccatgccagcaacccatagatcctccacagcaaaagcttcatttacacagagtcttccagcaacacgaaagtccactgctatacatgccccagtgactaagggtctccatacaacaaaaagattgacctctgctcgtattacagcaaaacagagttcagctactcccaggacaaccagcgcacctcatggaagagggaccctctcttcagatgctgccatcattgcagttggtaagtttggttcttcggcagttaaaaaaaattgtcatcactgtgggatgtacaatccttattcctggaggagaatattgtctttttactgccttaggaatactattaagatgaaatgtttaaggtcagggagaagacgggtaaatgcattttatcgacgtgtttggtggaccccgttaggtactcggtacgttcctaagtcttcccaaccgtgttcttgttccaaggtaattttagggcaacttcacatcatttggccagtcaatcaagtatccctgaacgcctattgtctcaatgcattatcattctaggggccaaaaacaacaataaggaagctattatcaatacagtttttaagcctcaagtgttttacaagtactcacaaactactcttggttgtttctagacgtctgttccagataaaccagaatgctactttgattacatcctgttcttttttccctttcctgtcagtgatttaaagcaaagatagctttaaaattattctgttgctatagacttaaggacatatctatgttgcaaatttctttttcttgttcccagtcttttgttgttcattaaatatattatttgatgttatacattttaccaagaagattaataactcctaaagaagatggcaaaagaaatgtttaagaagcaatacagctaagttggcatattaaaaggatgcccagtagaaaatatgcacattaaaaagtgaatattttaaaattatgtccttataagctgaggtctcctatttatgcatgcatgagtgaaacaagggactgaagctgaaaaggtgttttttaattattattattatttatagttcttttatagttcttttatattttgaatgaacctctccttagctaaaatagttatcttgaaagatttgaacagttggattcactttgtttgtttgatattttcaatagaaataaatgcattctaaatgaaaaaaaaaaaaaaaaaaaaaa

SEQ ID NO: 2341 - DNA, 899 bp, Homo sapiens
  misc_feature (856)..(856): n equals a,t,g, or c
  misc_feature (872)..(872): n equals a,t,g, or c
  misc_feature (885)..(885): n equals a,t,g, or c
  misc_feature (890)..(890): n equals a,t,g, or c
acgaacactgaattccgcattgcagagatattgtatttaagtgcccagctcgatacaataaacgccatttgaccattcaccacattggtgtgcacctgggttgggatctgcggccgcaccggtccggaattcccgggtcgacccacgcgtccgttcctgcagcccctgttgattggagagctggccccagaggagcccagccaggatggaccccaggacgcccagctggtggaggacttccgcgccctacgccaggcggccgaggacatggagctgtttgaggccaagcccgccttcttcgctctcctgctgggccacatcctggccatggaggtgctcgcttggcttctcgtctacctcttcggcccgggctgggtgcccagcacccttgccgcccttgtcctggccacctcccaggctcagtgctggtgtctgcagcatgacctgggccacacgtcggtcttcaggaagtcccagtggaaccacgtggcccagcagtttgtgatggggcagctgaagggcttctcggcccactggtggaacttccgccacttccagcaccatgccaagcccaacatcttccacaaagacccagatgtgaccgtggcgcccgtcttcctcctgggggagtcgtccgttgagtacggcaaaaagaagcgccggtacctgccctaccatcgscagcacctgtacttcttcctgatcggcccaccgctgctcaccctggtgaacttcgaggtggaaaatctggcctacatgctggtgtgcatgcagtggacggacctgctgtggccgcagcttctactccgttcttctatgtacgccccctttacggctcctggggcctgtcctcttngtgtgcaggtcctggnagcactggtcggnggatncgcaatgat

SEQ ID NO: 2342 - DNA, 287 bp, Homo sapiens
  misc_feature (156)..(156): n equals a,t,g, or c
aagctggtccaggcagacttgccccatccgcccccctccccacctggcctagggggccctgcccacccttctggatctgctgtcctcacctcagccccctcacctgtgtgcttggcagccctaaggccatggytyttggccaaacaggaccagggntagggggatggtacataaagccacacagcatggcatgttttcctagagcaaaaatttagggaaaactgttatttttatataaaaacaaacccagataaaaaaaaaaaaaaaaaataaaaaaaaaaaaaaaa

SEQ ID NO: 2343 - DNA, 622 bp, Homo sapiens
  misc_feature (559)..(559): n equals a,t,g, or c
cgtggcccagcagtttgtgatggggcagctgaagggcttctcggcccactggtggaacttccgccacttccagcaccatgccaagcccaacatcttccacaaagacccagatgtgaccgtggcgcccgtcttcctcctgggggagtcgtccgttgagtacggcaaaaagaagcgccggtacctgccctaccatcgccagcacctgtacttcttcctgatcggcccaccgctgctcaccctggtgaacttcgaggtggaaaatctggcctacatgctggtgtgcatgcagtggacggacctgctgtgggccgccagcttctactcccgcttcttcctatgctacgcccccttctacggcctccctggggccctgctcctcttcgttgctgtcagggtcctggagagccactggttcgtgtggatcacgcagatgaatcacatccccaaggagattggccatgagaagcaccgggaytgggccagytytcagctggcggccacctgcaacgtggagccctcgctcttcattgamtggktcagcggccacctcaacttccanatcgagcaccacctcttccccacgatgccgaggcacaactaccgcagggtggccccgctggtc

SEQ ID NO: 2344 - DNA, 1284 bp, Homo sapiens
tcgacccacgcgtccgagcccgccttcttcgctctcctgctgggccacatcctggccatggaggtgctcgcttggcttctcgtctacctcttcggcccgggctgggtgcccagcacccttgccgcccttgtcctggccacctcccaggctcagtgctggtgtctgcagcatgacctgggccacacgtcggtcttcaggaagtcccagtggaaccacgtggcccagcagtttgtgatggggcagctgaagggcttctcggcccactggtggaacttccgccacttccagcaccatgccaagcccaacatcttccacaaagacccagatgtgaccgtggcgcccgtcttcctcctgggggagtcgtccgttgagtacggcaaaaagaagcgccggtacctgccctaccatcgccagcacctgtacttcttcctgatcggcccaccgcctgctcaccctggtgaacttcgaggtggaaaatctggcctacatgccggtgtgcatgcagtggacggacctgctgtgggccgccagcttctactcccgcttcttcctatgctacgcccccttctacggcctccctggggccctgctcctcttcgttgctgtcagggtcctggagagccactggttcgtgtggatcacgcagatgaatcacatccccaaggagattggccatgagaagcaccgggactgggccagctctcagctggcggccacctgcaacgtggagccctcgctcttcattgactggttcagcggccacctcaacttccagatcgagcaccacctcttccccacgatgccgaggcacaactaccgcagggtggccccgctggtcaaggcactgtgtgccaagcacggcctcaactacgaggtgaagcccttcctgactgccctggtggacatcgttgggtcactgaagaagtctggcgacgtctggctggaagcctacctccaccagtgagggcagcaccccgggcccggctgccgccaagctggtccaggcagacttgccccatccgcccccctccccacctggcctagggggccctgcccacccttctggatctgctgtcctcacctcagccccctcacctgtgtgcttggcagccctaaggccatggctcttggccaaacaggaccagggctagggggatggtacataaagccacacagcatggcatgttttcctagagcaaaaatttagggaaaactgttatttttatataaaaacaaacccagataaaaaaaaaaaaaaaaaataaaaaaaaaaaaaaaaaaaaa

SEQ ID NO: 2345 - DNA, 921 bp, Homo sapiens
  misc_feature (146)..(146): n equals a,t,g, or c
  misc_feature (872)..(872): n equals a,t,g, or c
  misc_feature (879)..(879): n equals a,t,g, or c
  misc_feature (892)..(892): n equals a,t,g, or c
  misc_feature (902)..(902): n equals a,t,g, or c
ggcggccgttctagcccgggcggatcccccgggctgcaggtgacgcagacgggcaggccaccctgttgaacctcctgctgcggaattacctacactacagcttgtacgwccaggcygagaagctggtgtccaagtcygtgttcccngagcaggccaacaacaatgagtgggccaggtacctctactacacaggccggatcaaagccattcagctggagtactcagaggcccggagaacgatgaccaatgcccttcgcaaggcccctcagcacacagctgtcggcttcaaacagacggtgcacaagcttctgattgtggtggagctgctgctcggggaaatcccagaccgactacagttccgccagccgtccctcaagcgctcgctcatgccctacttccttctgactcaagctgtcaggaccggaaacctagccaagttcaaccaggtcctggaccagtttggggagaaatttcaagcagatgggacctataccctaatcatccgactgcggcacaacgtcattaagacaggtgtgcgcatgatcagcctctcctattcccgaatctccctggccgacatcgcccagaagctgcagctggatagcccagaggacgcggagttcattgttgccaaggccatccgggatggtgtcattgaggccagcatcaaccacgagaagggctacgtcagtccaaggagatgattgacatctactctacccgtgagccccactggcctttcaccagcggatctccttctgsctcgacatccacaacatgtccgkcaaggscatgagggttcctcccaaatcattacaacaaggactttggagtctkgcaaaggraacggcgtggaaccgaagaaccaggcnagggacnttgggaaggttcngcccaaaggnagaatgggccaggaaagaa

SEQ ID NO: 2346 - DNA, 131 bp, Homo sapiens
  misc_feature (129)..(129): n equals a,t,g, or c
agatctcagacgacctgatgcagaagatcagcactcagaaccgccgggccctggaccttgtggccgcgaagtttactactatcacgcccgggtctatgagtttctggacaagctggatgtggtgcgcantt

SEQ ID NO: 2347 - DNA, 212 bp, Homo sapiens
tgtactactatcacgcccgggtctatgagtttctggacaagctggatgtggtgcgcayttcttgcacgctcggctccggacagccacgctccggcacgatgcggacggccaggccaccctgctcaacctgctgctgcggaactacctgcactacagcttgtacgaccaggccgagaagctggtgtccaagtccgtgttcccggagcaggcca

SEQ ID NO: 2348 - DNA, 1314 bp, Homo sapiens
  misc_feature (1308)..(1308): n equals a,t,g, or c
cgggtcgacccacgcgtccgcgctagccgcctgggaatttaagggacccacactaccttcccgaagttgaaggcaagcggtgattgtttgtagacggcgctttgtcatgggacctgtgcggttgggaatattgcttttcctttttttggccgtgcacgaggcttgggctgggatgttgaaggaggaggacgatgacacagaacgcttgcccagcaaatgcgaagtgtgtaagctgctgagcacagagctacaggcggaactgagtcgcaccggtcgatctcgagaggtgctggagctggggcaggtgctggatacaggcaagaggaagagacacgtgccttacagcgtttcagagacaaggctggaagaggccttagagaatttatgtgagcggatcctggactatagtgttcacgctgagcgcaagggctcactgagatatgccaagggtcagagtcagaccatggcaacactgaaaggcctagtgcagaagggggtgaaggtggatctggggatccctctggagctttgggatgagcccagcgtggaggtcacatacctcaagaagcagtgtgagaccatgttggargargaggaggaagaggaggaagaggaagggggagacaagatgaccaagacaggaagccaccccaaacttgaccgagaagatctttgacccttgcctttgagcccccaggaggggaagggatcatggagagccctctaaagcctgcactctccctgctccacagctttcagggtgtgtttatgagtgactccacccaagcttgtagctgttctctcccatctaacctcaggcaagatcctggtgaaacagcatgacatggcttctggggtggagggtgggggtggaggtcctgctcctagagatgaactctatccagccccttaattggcaggtgtatgtgctgacagtactgaaagctttcctctttaactgatcccacccccacccaaaagtcagcagtggcactggagctgtgggctttggggaagtcacttagctccttaaggtctgtttttagacccttccaaggaagaggccagaacggacattctctgcgatctatatacattgcctgtatccaggaggctacacaccagcaaaccgtgaaggagaatgggacactgggtcatggcctggagttgctgataatttaggtgggatagatacttggtctacttaagctcaatgtaacccagagcccaccatatagttttataggtgctcaattttctatatcgctattaaacttttttctttttttctaaaaaaaaaaaaaaaanactcga

SEQ ID NO: 2349 - DNA, 2572 bp, Homo sapiens
  misc_feature (9)..(9): n equals a,t,g, or c
  misc_feature (2331)..(2331): n equals a,t,g, or c
  misc_feature (2406)..(2406): n equals a,t,g, or c
  misc_feature (2529)..(2529): n equals a,t,g, or c
  misc_feature (2533)..(2533): n equals a,t,g, or c
  misc_feature (2536)..(2536): n equals a,t,g, or c
  misc_feature (2570)..(2570): n equals a,t,g, or c
gccggttcnggaaatttccccggggtcgacccacgygtccgccgaagttggtctgaaggcaagggcttgttggttgtggacagcactttgtcatgggacctgtacggttggggatgttgcttttcattttggctgtgtatggcgcttgggttgcgacgccgaaggaggaagacgatgacacagaacgcttgcccagcaaatgtgaagtgtgtaagttgctgagcctggagctgcaggaaaagctgagtcgcactggccgatctcgagaggtgctggagctggggcaggtgctagacactggcaagagaaagaggcacatcccctacagtgtttcagagacaaggctggaagaggccttggagaatttgtgtgaccggatcctggactacagtgttcatgctgagcgcaagggctcactgagatatgccaagggtcagagtcagaccatggcaacgctgaaaggtctggtgcagaagggggtgaaggtggatctggggatccctctggagctgtgggacgagcccagcgtggaagtcacattcctcaagaagcagtgtgagacaatgctggaggagtttgaagatgtcgtgggagactggtacttccatcatcaggaacagccgttacagcattttctctgtgaaggtcatgtgctcccccctgctgaaactgcatgtctacaggaaacttggactggaaaggaaaagatcacggatgggcaagagaagacagaaggggaggaggaacacgatcaggaggaggaagaagaggaagaggaggaagagaggatcaacacaccagggcactccaagcatgaccctgaggatctctgactcttgcctttgagcccccaggaggggcaggagtcatggagaagaaccctctgaaatctgagctctctgtgctccacataagggcatgtgtgtatgtgtgagtgatcccaccccggagcttgtagctgttctcacctgtctggtctcaggtaggatcctagtggtgcagcatagcaaggctatggggacaaaaccaggaacaggaggcagaaggcctgcttcaaccgatgagtcctctgcctgccacagagccccttaactggcaggtgtgtgtgtgtggtgacaatgctgaaggctttcccctttaaatctctctactacttcccaccccacccagaggtcagtgaagccattggacctatgggtctaaggcgaaaggcactttgtccttcgggtccgtttttagatccctacaaggaagaagccagcttggacattctctacgacctatacacaccgcctgcgtcaaggctacaacccaagaaactgaacaaaaaaggggacactatgaagatggggcaatgatgttaagttaggtggggtagatattcggtctacttcatacaaatatcaccgagggcccaccatgtaatttcacaggtgccaaattttctacattgctagtaaattttttaaaacatcacctgggcccctagtttcaaacaacttccctgcacacttcatacctggccgatatagcagcgcccagagaatggggccgttcgtcgcccgctgttggaagctaatggtggtttgtaatttgcagtccagggaggctggcaggggtgccccggctgataaccatttaggcgcggggcagtgccaggctctcggcgcgtgcgggggaaggcaccggaattaagagaccgcgtccggcagcgcgtctcggccaccatcctccgggtttacgggagctcgcagaggacaaaatttctcgcgcttttccggggggcggagctaacctggcagggagggaaggattaggagaagcggtgacactaggtccaaggcgggaagcgcctcggttagattgagggaaataaagaggatgtcctttgtgggatgatgggtgaggacctaccacaagagaagcgtggcgaaggccgaaaaccgagggaatggcggggttcgcgctaagggaagcttggacgagaccatctacggatagggggttagggcgataccatcttgagggagttagggggtggcaaagaacagccgtggaaggtgctacttggaggaggcggkgcgcacgtgggaacccaaagagactgggccgtcgcctacatccgcacttcccttccccagccgtcccgatcctgccatgagcgctgcggtgcggaccgagccgctgcgcggggagccgcctctgctggtgcgcggcgacccctactcggtggtggtcctgcttcagggctacgcggagccggagggggtcgacgacgcggtacgcgccgacggctccgtgacgcttgtgctgctcargcctggggctcanccaccagccttcaagagtccccgcccacagcggcggggcgaagaccgcctggaagaagcggcccgtggccccatncttgtggacactgggggcccctgggctcgggaggccgcttctgggggccctggcggggcaaggcatgggcccctggagacgtgaccttgtggtgggcacccacggacacttggaatcacattngggnaancttggggcttttttcctgggggcgggttctgctngg

SEQ ID NO: 2350 - DNA, 495 bp, Homo sapiens
ctggtccggaattcccgggtcgacccacgcgtccgcaggctggtctcaaactcctgacctcaggtgaccacctgcctctgcctcccaaagtgctgggattacaggcttgagccactgcgcccagccagtgtctttaatttttaaggtaccaatttagttccttattttttatcgttatgtgacgttatgtgatcagttgaaggtgtatttcatgtattttgacctataatgttgctagtttagtttctggagaaatggtgtgtaacagtggaatgtcacttgtcttcaaagcattagctttctgtgtaaggttgaggttgtaatataaatgcgctagatgtgtttttattaggggaattgactattcttacctttcatgttatttgacagtattctttgtcaacttcaaataacggcctattttgatgagattttatagtgctaggatcactgatattcttgttagttgatttaaaatcatggtgttcattggct

SEQ ID NO: 2351 - DNA, 3108 bp, Homo sapiens
ccacgcgtccgccgaagttggtctgaaggcaagggcttgttggttgtggacagcactttgtcatgggacctgtacggttggggatgttgcttttcattttggctgtgtatggcgcttgggttgcgacgccgaaggaggaagacgatgacacagaacgcttgcccagcaaatgtgaagtgtgtaagttgctgagcctggagctgcaggaaaagctgagtcgcactggccgatctcgagaggtgctggagctggggcaggtgctagacactggcaagagaaagaggcacatcccctacagtgtttcagagacaaggctggaagaggccttggagaatttgtgtgaccggatcctggactacagtgttcatgctgagcgcaagggctcactgagatatgccaagggtcagagtcagaccatggcaacgctgaaaggtctggtgcagaagggggtgaaggtggatctggggatccctctggagctgtgggacgagcccagcgtggaagtcacattcctcaagaagcagtgtgagacaatgctggaggagtttgaagatgtcgtgggagactggtacttccatcatcaggaacagccgttacagcattttctctgtgaaggtcatgtgctcccccctgctgaaactgcatgtctacaggaaacttggactggaaaggaaaagatcacggatgggcaagagaagacagaaggggaggaggaacacgatcaggaggaggaagaagaggaagaggaggaagagaggatcaacacaccagggcactccaagcatgaccctgaggatctctgactcttgcctttgagcccccaggaggggcaggagtcatggagaagaaccctctgaaatctgagctctctgtgctccacataagggcatgtgtgtatgtgtgagtgatcccaccccggagcttgtagctgttctcacctgtctggtctcaggtaggatcctagtggtgcagcatagcaaggctatggggacaaaaccaggaacaggaggcagaaggcctgcttcaaccgatgagtcctctgcctgccacagagccccttaactggcaggtgtgtgtgtgtggtgacaatgctgaaggctttcccctttaaatctctctactacttcccaccccacccagaggtcagtgaagccattggacctatgggtctaaggcgaaaggcactttgtccttcgggtccgtttttagatccctacaaggaagaagccagcttggacattctctacgacctatacacaccgcctgcgtcaaggctacaacccaagaaactgaacaaaaaaggggacactatgaagatggggcaatgatgttaagttaggtggggtagatattcggtctacttcatacaaatatcaccgagggcccaccatgtaatttcacaggtgccaaattttctacattgctagtaaattttttaaaacatcacctgggcccctagtttcaaacaacttccctgcacacttcatacctggccgatatagcagcgcccagagaatggggccgttcgtcgcccgctgttggaagctaatggtggtttgtaatttgcagtccagggaggctggcaggggtgccccggctgataaccatttaggcgcggggcagtgccaggctctcggcgcgtgcgggggaaggcaccggaattaagagaccgcgtccggcagcgcgtctcggccaccatcctccgggtttacgggagctcgcagaggacaaaatttctcgcgcttttccggggggcggagctaacctggcagggagggaaggattaggagaagcggtgacactaggtccaaggcgggaagcgcctcggttagattgagggaaataaagaggatgtcctttgtgggatgatgggtgaggacctaccacaagagaagcgtggcgaaggccgaaaaccgagggaatggcggggttcgcgctaagggaagcttggacgagaccatctacggatagggggttagggcgataccatcttgagggagttagggggtggcaaagaacagccgtggaaggtgctacttggaggaggcggggcgcacgtgggaacccaaagagactgggccgtcgcctacatccgcacttcccttccccagccgtcccgatcctgccatgagcgctgcggtgcggaccgagccgctgcgcggggagccgcctctgctggtgcgcggcgacccctactcggtggtggtcctgcttcagggctacgcggagccggagggggtcgacgacgcggtacgcgccgacggctccgtgacgcttgtgctgcctcaggcctggggctcagccaccagcctccaagagtccccgccccacagcggcggggcgaagaccgccctggaagaggcggcccgtggccccatcctcgtggacactgggggcccctgggctcgggaggcgctcctgggggccctggcggggcagggcatggcccctggagacgtgacgctggtggtgggcacccacggacactcggatcacatcgggaacctggggctttttcctggggcggctctgctggtctcgcacgacttctgcctgcccggaggccgctacctcccccacgggctaggtgaggagcggcccctgcagctgggccccgggctcgaggtgtgggccacgccgggccatgggggccagcgggacgtgagcgtggtggtggcgggcacggccctgggcaccgtggtggtggcaggcgacgtgtttgaacgcagcggagacgaagactcatggcaagcgctgagcgaagacccggtggcccaggagcggagccggaagagggtcctagatactgcggacgtagtcgtgcctggtcacggagccccctttagggtggtcagagaagcccctcagccacggaactgatgtccagaagaccagaggtcagtgtgatcgcttccagcccccttgcaagaggccggttttccagcgaggacagtcatctctatcactggttctgcaaccaaactaggaccaaagactggctcagccgtgtgccacctctcagggtcccccgtaaagtaggagaatgttcttgggagggtcgtccaaaataaaaataggcaactgcatagaaaaaaaaaaaaaaaaaaa

SEQ ID NO: 2352 - DNA, 411 bp, Homo sapiens
  misc_feature (312)..(312): n equals a,t,g, or c
  misc_feature (330)..(330): n equals a,t,g, or c
  misc_feature (333)..(333): n equals a,t,g, or c
  misc_feature (360)..(360): n equals a,t,g, or c
cccgacgcgtccgatttatactgtctgggaatgtgtggttgtagttctgtgggagaaatatatggttgaactaacattaatacacatcaccatttatttatactgtctgggaatgtgtggttgtagttctgtgggagaaataawttgtcagtgttcaccagctgtaaaaatctagtgcgagarcttaaacatctaaataaataatgaaatgcatttatcatcattgaaattgttkggcttaaagttaactggttttgtaaaaaatgatataaatgaattaggctttacttagtgccattgaagtatgtcccnttttttttttaaacgaanggnttaaatgaagttgacattagtaagtcntgattgacacaattgtacagtcctgagaactgcctaacataaaagtacctt

SEQ ID NO: 2353 - DNA, 1123 bp, Homo sapiens
  misc_feature (57)..(57): n equals a,t,g, or c
  misc_feature (79)..(79): n equals a,t,g, or c
  misc_feature (82)..(82): n equals a,t,g, or c
  misc_feature (122)..(122): n equals a,t,g, or c
  misc_feature (127)..(127): n equals a,t,g, or c
  misc_feature (307)..(307): n equals a,t,g, or c
  misc_feature (1106)..(1106): n equals a,t,g, or c
  misc_feature (1113)..(1113): n equals a,t,g, or c
  misc_feature (1117)..(1117): n equals a,t,g, or c
  misc_feature (1121)..(1121): n equals a,t,g, or c
gggtatttccaataattagtcatatttccaagccccaaaattttgggataaaaagcnaaatttcatcatttgtataccngtncagatgaggtttataaattgattttaagcccatatatatncaatncaatactgcaaaccamcaatgtttccaaactcaagatgtttcatttatcatgatggcacctcctctcaataaacaaatgctgttttatgggctgtgtgataatagcaatgaccatttagttatcaattttacaaaattaccaaatatcttcaggggaaggctgcatttaaaaaagaacanagcaatcaccaaaaaaaaaaaaaagcaaaaaacaaaaacaaacctcaggttaattaactactcccaattacaaaacatgaaagatttaaagaactaagggtccccagggacctccttattgcttttgccttggctctaagttttaagaatagtgtatattaagtgctaaactggcagagatggaagcaaaatctttttaaaaatacaatggagtactatttttttaaaaaaatcttactcagttttaactattaaaactgttaaatcagacaaggacatctgtcccttttagagtaacatgagctatgcaaaggaagcacttagattactgaaagaaatttaaaatttattaaaccttcatgtgccaaatattatgttccaatatcaaaacctgtaaaggcatccattatttgcaaatgatgagaaaacgggctcagaagttgctcaaaacaagttattatttggtggaactgagcttcaaattaaggccttcctctagtttctcaattacagcatagtacacaggcttgaaatttttaaacctttaaaaaggaaaatctgtaatggaaagtacttttaatgttaagcagttctcatgactgtaacaaattgtgtcaatcaagaacttactaaatgtcaacttcatttaatccttcgtttaaaaaaaaaaagaggacatacttcaaatggcactaagtaaagcctaattcatttatatcattttttacaaaaccagttaactttaagccaaacaatttcaatgatgataaatgcatttcattaccacacattgcccagncagctgntcgngacntg

SEQ ID NO: 2354 - DNA, 2591 bp, Homo sapiens
  misc_feature (403)..(403): n equals a,t,g, or c
  misc_feature (1731)..(1731): n equals a,t,g, or c
  misc_feature (1748)..(1748): n equals a,t,g, or c
  misc_feature (1807)..(1807): n equals a,t,g, or c
  misc_feature (2492)..(2492): n equals a,t,g, or c
  misc_feature (2497)..(2497): n equals a,t,g, or c
  misc_feature (2553)..(2553): n equals a,t,g, or c
  misc_feature (2563)..(2563): n equals a,t,g, or c
gggcggctgcgcacactccagagtgcccgcaacaaagcggttctgggggaggttggggctgttacccgcggcgggggcgcccgctattgcgcaggcgcctcaggaagatctctgcctcgcgcagagatcaggtcggcgtcgtccccagggcccacgagcgcggggttccgccagtgctgagttccgcgcgccggctgcagcgggaaccctgattgctttccttcaacacgttcattatgaagttattagtaatacttatattttctggacttataacttgttgtggaggtaactcttcccatagcctgccatccaagctgctgctggtgtcctttgatggtttcagagctgactatctacagaactatgaatttcctcatctccagaattttatcaaagaagnagtcctggtagagcatgttaaaaatgtttttatcacaaaaacatttcctaaccactacagcattgtgacgggcttgtatgaagaaagtcatggcatcgtggctaattccatgtatgatgtaatcacaaagaaacatttttctgactttgatgacaaggatcctttttggtggaatgaggcggkacctatttgggtgaccaatcagcttcaggaaaacagatcaagcgccgycgctatgtggcctggtactgatgtacccattcacaataccacaccttcctattttatgaattatagctcttcagtgtcatttgaggagagactaaataatattaccatgtggctgatgaattcgaacccaccagttacctttgcaacactctactgggaagaaccagatgcaagtggccacaaatatggacctgaagataaagaaaacatgtacagagtgttgaaggaagtagatgaccttattggtgagctagtccacaaactcaaggtgctaggattgtgggaaaatctcaatgtgatcattaccagtgatcatgggatgacccagtgytctaakgacaaattgataaacctggatctstgcattgatcgctcaagctacactcttgtagatctgactccagttgctgctgtccttcccaaaataaatacaacagaggtttataacaaactgaaagtctgtaaccctcacatgaatgtttatctcaaagaagacattcctgccagatttcattaccaacataatgatcgaattcagcctattattttggttgctgatgaaggctggacaattgtgttaaataaatcattaccaaaattaggtgaccatggttatgacaattctttgtcaagtatgcatccgtttctagctgcccatggtccagcatttcacwwaggytacaaacacagcacaattaacagtgtggatatttatccgatgatgtgccacatcctgggattaaaaccacatcccaataacggaacctttggtcatactaagtgtttgttagttgaccagtggtgcattaatctcccggaagccattggaattgygattggtgcgctcttggtcctaaccacgctaacatgcctgattataatcatgcagaatagactgtctgtaccgcgtccgttttcccgacttcagctgcaagaggacgacgacgatcctttaattgagtagcatgtgctggagtttatagagtgtctttgatcagtcacgatactgaggacacactcaagaatggtattctaacgatgaaaaatacaccttgagaggcaaagaacttagaccgagcatgctagaattattttgnttttccttgtgctttgntttactgcatcagctaatacataaaacccygaccatagcaaaaattgctagtaaatcangtagttaacaccaactatttctccaactagaaactttttgtaagaaaaataatgcctctgccttttttttgcaatgaagatttgacacatttttaaataaaaatctatcaaaatttaataggcatgcttttctaataaacttttatatttgtaactgaaataacagaaatctttatgcaattagtggattttgtgtatcaggaaggaaaagttttctatatttttatatttaataactttaatagagtttgtatcccaggtaaacctatgacattggaagacctctgtgaaggttaataaaattagttaagcaggcagaacagatctagcatatgaagaaattattttaagaaaagctattataagaaaaacaacaaaaaccatgtgatacaaagcttgagtctttaccattgtctttgttaagattcctaagctgttgaagccaggaaagatatctttcaaagactgttgctataagaaattaagaaaatggaaagaaaaaaaaaaaaaaaaagggcggccgtctagaggatccctcgaggggcccaagcttacgcgtgcatgcgacgtcatagctctctccctatagtgagtcgtattataagctaggcactggccgcgttttacaacgtcgtgactgggagatctgctagcttgggatctttgtgaaggaccttacttctgnggtgngacataattggacaaactacctacagagatttaaagctctaaggtaaatataaaanttttaagtgnataatggggtaaactagctgcataagct

SEQ ID NO: 2355 - DNA, 2329 bp, Homo sapiens
acgcgtccgggcggctgcgcacactccagagtgcccgcaacaaagcggttctgggggaggttggggctgttacccgcggcgggggcgcccgctattgcgcaggcccctcaggaagatctctgcctcgcgcagagatcaggtcggcgtcgtccccagggcccacgagcgcggggttccgccagtgctgagttccgcgcgccggctgcagcgggaaccctgattgctttccttcaacacgttcattatgaagttattagtaatacttatattttctggacttataacttgttgtggaggtaactcttcccatagcctgccatccaagctgctgctggtgtcctttgatggtttcagagctgactatctacagaactatgaatttcctcatctccagaattttatcaaagaaggagtcctggtagagcatgttaaaaatgtttttatcacaaaaacatttcctaaccactacagcattgtgacgggcttgtatgaagaaagtcatggcatcgtggctaattccatgtatgatgtaatcacaaagaaacatttttctgactttgatgacaaggatcctttttggtggaatgaggcggtacctatttgggtgaccaatcagcttcaggaaaacagatcaagcgccgccgctatgtggcctggtactgatgtacccattcacaataccacaccttcctattttatgaattatagctcttcagtgtcatttgaggagagactaaataatattaccatgtggctgatgaattcgaacccaccagttacctttgcaacactctactgggaagaaccagatgcaagtggccacaaatatggacctgaagataaagaaaacatgtacagagtgttgaaggaagtagatgaccttattggtgagctagtccacaaactcaaggtgctaggattgtgggaaaatctcaatgtgatcattaccagtgatcatgggatgacccagtgctctaaggacaaattgataaacctggatctctgcattgatcgctcaagctacactcttgtagatctgactccagttgctgctgtccttcccaaaataaatacaacagaggtttataacaaactgaaagtctgtaaccctcacatgaatgtttatctcaaagaagacattcctgccagatttcattaccaacataatgatcgaattcagcctattattttggttgctgatgaaggctggacaattgtgttaaataaatcattaccaaaattaggtgaccatggttatgacaattctttgtcaagtatgcatccgtttctagctgcccatggtccagcatttcacaaaggctacaaacacagcacaattaacagtgtggatatttatccgatgatgtgccacatcctgggattaaaaccacatcccaataacggaacctttggtcatactaagtgtttgttagttgaccagtggtgcattaatctcccggaagccattggaattgtgattggtgcgctcttggtcctaaccacgctaacatgcctgattataatcatgcagaatagactgtctgtaccgcgtccgttttcccgacttcagctgcaagaggacgacgacgatcctttaattgagtagcatgtgctggagtttatagagtgtctttgatcagtcacgatactgaggacacactcaagaatggtattctaacgatgaaaaatacaccttgagaggcaaagaacttagaccgagcatgctagaattattttggttttccttgtgctttgttttactgcatcagctaatacataaaaccctgaccatagcaaaaattgctagtaaatcagtagttaacaccaactatttctccaactagaaactttttgtaagaaaaataatgcctctgccttttttttgcaatgaagatttgacacatttttaaataaaaatctatcaaaatttaataggcatgcttttctaataaacttttatatttgtaactgaaataacagaaatcttttatgcaattagtggattttgtgtatcaggaaggaaaagttttctatatttttatatttaataactttaatagagtttgtatcccaggtaaacctatgacattggaagacctctgtgaaggttaataaaattagttaagcaggcagaacagatctagcatatgaagaaattattttaagaaaagctattataagaaaaacaacaaaaaccatgtgatacaaagcttgagtctttaccattgtctttgttaagattcctaagctgttgaagccaggaaagatatctttcaaagactgttgctataagaaattaagaaaatggaaagaaaaaaaaaaaaaaaaa

SEQ ID NO: 2356 - DNA, 2155 bp, Homo sapiens
  misc_feature (2135)..(2135): n equals a,t,g, or c
ggcacgaggacgaagggacgggacccgggagcctggacgagtccgagcgcgtcacctcctcacgctgcggctgtcgcccgtgtcccgccggcccgttccgtgtcgccccgcagtgctgcggccgccgcggcaccatggctgtgtttgtcgtgctcctggcgttggtggcgggtgttttggggaacgagtttagtatattaaaatcaccagggtctgttgttttccgaaatggaaattggcctataccaggagagcggatcccagacgtggctgcattgtccatgggcttctctgtgaaagaagacctttcttggccaggactcgcagtgggtaacctgtttcatcgtcctcgggctaccgtcatggtgatggtgaagggagtgaacaaactggctctacccccaggcagtgtcatttcgtaccctttggagaatgcagttccttttagtcttgacagtgttgcaaattccattcactccttattttctgaggaaactcctgttgttttgcagttggctcccagtgaggaaagagtgtatatggtagggaaggcaaactcagtgtttgaagacctttcagtcaccttgcgccagctccgtaatcgcctgtttcaagaaaactctgttctcagttcactccccctcaattctctgagtaggaacaatgaagttgacctgctctttctttctgaactgcaagtgctacatgatatttcaagcttgctgtctcgtcataagcatctagccaaggatcattctcctgatttatattcactggagctggcaggtttggatgaaattgggaagcgttatggggaagactctgaacaattcagagatgcttctaagatccttgttgacgctctgcaaaagtttgcagatgacatgtacagtctttatggtgggaatgcagtggtagagttagtcactgtcaagtcatttgacacctccctcattaggaagacaaggactatccttgaggcaaaacaagcgaagaacccagcaagtccctataaccttgcatataagtataattttgaatattccgtggttttcaacatggtactttggataatgatcgccttggccttggctgtgattatcacctcttacaatatttggaacatggatcctggatatgatagcatcatttataggatgacaaaccagaagattcgaatggattgaatgttacctgtgccagaattagaaaagggggttggaaattggctgttttgttaaaatatatcttttagtgtgctttaaagtagatagtatactttacatttataaaaaaaaatcaaattttgttctttattttgtgtgtgcctgtgatgtttttctagagtgaattatagtattgacgtgaatcccactgtggtatagattccataatatgcttgaatattatgatatagccatttaataacattgatttcattctgtttaatgaatttggaaatatgcactgaaagaaatgtaaaacatttagaatagctcgtgttatggaaaaaagtgcactgaatttattagacaaacttacgaatgcttaacttctttacacagcataggtgaaaatcatatttgggctattgtatactatgaacaatttgtaaatgtcttaatttgatgtaaataactctgaaacaagagaaaaggtttttaacttagagtagccctaaaatatggatgtgcttatataatcgcttagttttggaactgtatctgagtaacagaggacagctgttttttaaccctcttctgcaagtttgttgacctacatgggctaatatggatactaaaaatactacattgatctaagaagaaactagccttgtggagtatatagatgcttttcattatacacacaaaaatccctgagggacattttgaggcatgaatataaaacatttttatttcagtaacttttccccctgtgtaagttactatggtttgtggtacaacttcattctatagaatattaagtggaagtgggtgaattctactttttatgttggagtggaccaatgtctatcaagagtgacaaataaagttaatgatgattccaaaaaaaaaaaaaaaaaaaaaattcgatatcaagcttatcgataccgtcgacctcgagggggggcccgnacccaaaacgccctaatagt

SEQ ID NO: 2357 - DNA, 2063 bp, Homo sapiens
gggtcgacccacgcgtccgggctgagcgcgtcacccactatcgttgcggtggtcgcttaccttctgccggcccggtccgtgccgccctttgctgttgtggccaccgcgggaccatggctgcgctcgtggtgctcctgtccttgttggcggcgggtgttttggggaacgagtttagtatattaagatcacctgggtctgttgttttccgagatggaaattggcctataccaggagaacgtatcccagacgtggctgcattgtccatgggcttctctgttaaagaagacctttcttggccaggacttgcagtgggaaacctgttccatcgtcctcgggctacggtgatggtgatggtgaagggagtcgacaagcttgctctgcccccgggccgtgtcatttcgtaccctttggagaatgcagttcctttcagtcttgacagcgttgcaaattccattcactccttattttctgaagaaactcctgtagttttgcagttggctcccagtgaggagagagtgtatatggtggggaaggcgaactcggtctttgaagatctctccgtcacattacgacagctccgcaatcgcctgttccaagaaaactctgttctcaattcacttccgctcaattctctgagcaggaacagtgaagttgacctgctctttctttctgaattgcaagtgctccatgatatttcaagtttgttgtctcgacataagcatctagccaaggatcattctcctgatttatattcgctggagctggcaggtttggatgaaattgggaagcattatggggaagattctgaacaattcagagatgcttccaagatccttgttgatgctctgcaaaagtttgcagatgacatgtacaacctttatggcgggaatgcagtggtggaattagtgactgtcagatcatttgacacctctcttgtcaggaagacaaggactattcttgaggcaaaacaagcgaagagcccatcgagcccctataaccttgcatataagtataaccttgaatatgcggtggktttcaacatggtactttggataatgattgccttggccttggctgtgattatcacctcttataatatctggamcatggatcctggatatgacagcattatttataggatgacaaaccagaagattcgaatggattgaactttcctcaagccagacttagaaaaggggtttggaaattggctgttttattaaatctttaagtgtagtttaaaagtagatggtatacttcaaatttatatatataaaaaaaaatttgctctccgtgtgccctgtgatgttcttttagagtgaattatagtattgatgtgaattgatttgtgtgctgtagagtccataatatgctcaaatataaccatttaatacaatttcattccatttaacattggaaatgtgcactgaaataaatgtaaaacatttagaatagcttgcattatttatgktggggaaaatgcactgaacttattagacaaacttaggagtgcttaacttccttacacaggctaggtgaaaatgacatttgggctgktctataccatgaaccattttaaatgkcttaatctgatgtaaatatttcagaaacaagtcagaaggttgttaacttcaagtcaccctaaactgtgggagggcttccccagtgactcagattgagaactgcacctgacagagggtggctgtgttgtaacctcttctgcaagtctggtgatccacatcgttgggtggatattaaaaatacattgatctaaaaagaaaccagctttgtggagttagagatatctgtaattatataccccwwaaccaattttggggggacatcttggagcttgactataaaaaatgtattttagtaactttcctctgtgtaagttactgttaatggcttgtggtacatcattctctagaatattaagtggaagtaaatgctctctacttttcatgtggaagtggaccaatgtctataaagagtgacaaataaagttaataatgattccaaaaaaaaaaaaaaaaaaaaaaaaaaaaaaaaaaagggcggcc

SEQ ID NO: 2358 - DNA, 795 bp, Homo sapiens
  misc_feature (409)..(409): n equals a,t,g, or c
  misc_feature (761)..(761): n equals a,t,g, or c
  misc_feature (768)..(768): n equals a,t,g, or c
  misc_feature (776)..(776): n equals a,t,g, or c
  misc_feature (793)..(793): n equals a,t,g, or c
tcgacccacgcgtccggatggcggctgggtcggttgggtcgctccggccggcgtttgcgctgcggttgctcttggctgctgtgcttcaagcggtgtctgcgtttggggcagagttttcatcagaggcttgcagagagttgggcttctccagcaacttgctctgcagctcttgtgatcttcttggacagtttaacctgcttcagttggatcctgactgtagaggatgctgtcaggaagaagcacaatttgaaactaaaaagctttatgcaggagctattcttgaagtctgtggatgaaaattggggaggttccctcaagtccaagcttttgtcaggagtgataaacccaaactattcagaggactacaaatcaagtatgttcgtggttccgatcctgtattaaagctttnggatgacaacgggaacattgctgaagaattaagcatcctcaaatggaacacagacagtgtagaagaattcctgagtgaaaagttggaacgcatataaatcttgcttcaattttgtcctatccttttgttactttatcagatgaaatattacagtacctagagaatattttagttttgcttccttcctttgatcactttctgtgaggcattaaacatctcattaacagtggaagtggtagcgtagcccgcggtatctgaggagtcggcaaacttaacaaaamccarattctcatacattgccttccttccacatttgttggtaccggctgagaaatttaaccagttaacaaangataacncccccctngtccccccgtgtaaganaa

SEQ ID NO: 2359 - DNA, 641 bp, Homo sapiens
  misc_feature (579)..(579): n equals a,t,g, or c
gcggccgccctttttttttttttttcgattttttgggaaactttatttatattttgatcttaaaagaacattttttatttttctgtaagagtgggaagcacaaaaatttgctaaatatcagatccacacaaaccctcctgaaggttttctgtgtagccttcattaatgcaaatctctgaatgtttcactcttactgtagatcttgaatctgttttacaataatgaagccataaagttttaccgcagcacattcattatgaactgtaacatttctattaaaaggacagccggaagaatgagaagcaggcaatctgttgaggctcagtggctcttacttgctttgtagttcttgctggtgctttcagagagcacacagcacatgcatggggcacagtaggcatctcccttattaacctccctaatctaaaaatctgttgttcataaaactggacaaattacaaactatcatttgcataattagccaactctgttatgaagcattttgtcagtggtaccaacaaatgtggaaggaaggcaatgtatgagaactgggttttgttaaatttgccgactcctcanataccgcgggctacgctaccacttccactgttaatgaaatgtttaatgcctccccccaaagt

SEQ ID NO: 2360 - DNA, 1628 bp, Homo sapiens
  misc_feature (18)..(18): n equals a,t,g, or c
  misc_feature (27)..(27): n equals a,t,g, or c
acccgtcgtaagcttggncctttaggnggcccccttttttttttttttttttttttaccatttaacttgttttaatgtttcttcacaaatggtgaaaaatactaaagtacagacaaggaataatcataatgttgtggccaacattataaatatggaattataaatttaaaacattttctggtttaaaaaataaatctggtagtcaatgcagctctgcggggtctctgcatctagtagggccgatctctgcgctcctgacggtgctcgcctttatccatttttccaggtcctccacgtcctcctcttcttcctcccatctgttccatcaaaggtccagggggccccccagggccacctcgtcttcctccaccaaagccacctcggtccatgccccggccaccacggaagccacctctgtctccaccacggccacctctgaacattccaccgggaccaccacgatccatgaggccacctcttcctccccgcatgccaccagggccacctctgccacgatcaccacccgggggcggaaagggtggcgggaggaagccttcaggctttggggccttacactggttgcactctgttctccaggcgaagttctggtttccacaacccggattgggacactgccagtctccagctcggtgctggacgtttcctcctccagaggggttccctcgggaaccccggggtcctcttggagggaagcctcctctatctcctccacggcctcccatgcgacccatgggtcccccaggacctcctgggcctcctggacctccacggagtggtggtggcatgcctctgccctcacggggtggcagaccaccccgcatactgttcattggaggcttcttccgagcaagggagactttaagtttgctcccttgaaaatctttcccatcaaaccattccacggcagccttggcagtgggtgggtcttcataggacactgtggcatcgcctttgggctttcctgtttccttgtccaggtagatgtggatcatgggttgcccagttctcttgttcatcttaacaaccccacactgcttaaagaagtctgccagatcatctagagtcacactgtcatttaatccttgtacataaattgcactgttgtcagagtcttcatctggatctacaggtgggcctagatcaagatctggtccttcatccatgggtccaccaggcttattgaagccacctcgctctccagcgcccattccaccgcgtcctcctccccgcccacctctgctcatgcctccacgatcaaatccccctcttcccctgccccggttatcagggccactcatgctccggttctctcctggtccggaaaatcctccagactcctgcccataaacacccatgctactggggtggtcctgtcggaatgaactctgctgcccgtagctgctgctctgttggctatattgacttggagcttggctgtaggatccagtttggggtgggtaactagtgggaggctgctgcccatagctgctttgttgaccatagctactctgctgtccatagctgctcggttgcccataggtgttctgctgagagtaactgctctgwtcataactagtcggctgtgtagaggaatagctggtaggagg

SEQ ID NO: 2361 - DNA, 1401 bp, Homo sapiens
tcgggtcgcggtatcgataagcttgatatcgaattcggcacgaggaccgattggtgtgaatactggagggggtcttccacttgttaatgacccagaaacattcctgccgacttccagccttctctcatttcctccatttttctcttcctctgttctgtgcatgaactggcacatcactacttagagcagaagatatgctgggcttctgatgatggctgcactgcatgcagcagcgtgcagggtcaaagacagccggccccccatgtcagtggtctaggatggccagtgaaggcaccaacatcccaagtcctgtggtgcgccagattgacaagcagtttctgatttgcagtatatgcctggaacggtacaagaatcccaaggttctcccctgtctgcacactttctgcgagaggtgcctgcagaactacattcctgcccacagtttaaccctctcctgcccagtgtgccgccagacctccatcctgcccgagaaaggggtggccgcgctccagaacaatttcttcatcacaaacctgatggacgtgctgcagcgaactccaggcagcaacgctgaggagtcttccatcctggagacagtcactgctgtggctgcgggaaagcctctctcttgcccaaaccacgatgggaatgtgatggaattttactgccagtcctgtgagactgccatgtgtcgggagtgcacggagggggagcacgcagagcaccccacagttccactcaaggatgtggtggaacagcacaaggcctcgctccaggtccagctggatgctgtcaacaaaaggctcccagaaatagattctgctcttcagttcatctctgaaatcattcatcagttaaccaaccaaaaggccagcatcgtggatgacattcattccacctttgatgagctccagaagactttaaatgtgcgcaagagtgtgctgcttatggaattggaggtcaactatggcctcaaacacaaagtcctccagtcgcagctggatactctgctccaggggcaggagagcattaagagctgcagcaacttcacagcgcaggccctcaaccatggcacggagaccgaggtcctactggtgaagaagcagatgagcgagaagctgaacgagctggccgaccaggacttccccttgcacccgcgggagaacgaccagctggatttcatcgtggaaaccgaggggctgaagaagtccatccacaacctcgggacgatcttaaccaccaacgccgttgcctcagagacagtggccacgggcgaggggctgcggcagaccatcatcgggcagcccatgtccgtcaccatcaccaccaaggacaaagacggtgagctgtgcaaaaccggcaacgcctacctcaccgccgaactgagcaccccctcgtgcc

SEQ ID NO: 2362 - DNA, 2350 bp, Homo sapiens
  misc_feature (2224)..(2224): n equals a,t,g, or c
  misc_feature (2227)..(2227): n equals a,t,g, or c
  misc_feature (2340)..(2340): n equals a,t,g, or c
  misc_feature (2343)..(2344): n equals a,t,g, or c
  misc_feature (2346)..(2349): n equals a,t,g, or c
attgatttcctcttyttyccctctccscgtccagtgctgggctttttcagacaagtgcatctcctaaccaggtcacatttcagccgcgacccactctccgccagtcaccggaggcagaccgcgggaggagagctgaggacagccgcgtgcgcttcgccagcagcggggtgggaggaaggacattaaaatactgcagaagtcaagaccccccaggtcgaacccagaccacgatgcgcgccccgggctgcgggcggctggtgctgccgctgctgctcctggccgcggcagccctggccgaaggcgacgccaaggggctcaaggagggcgagacccccggcaatttcatggaggacgagcaatggctgtcgtccatctcgcagtacagcggcaagatcaagcactggaaccgcttccgagacgaagtggaggatgactatatcaagagctgggaggacaatcagcaaggagatgaagccctggataccaccaaggacccctgccagaaggtgaagtgcagccgccacaaggtgtgcattgcccagggctaccagcgggccatgtgcatcagtcgcaagaagctggagcacaggatcaagcagccgaccgtgaaactccatggaaacaaagactccatctgcaagccctgccacatggcccagcttgcctctgtctgcggctcagatggccacacttacagctctgtgtgtaagctggagcaacaggcgtgcctgagcagcaagcagctggcggtgcgatgcgagggcccctgcccctgccccacggagcaggctgccacctccaccgccgatggcaaaccagagacttgcaccggtcaggacctggctgacctgggagatcggctgcgggactggttccagctccttcatgagaactccaagcagaatggctcagccagcagtgtagccggcccggccagcgggctggacaagagcctgggggccagctgcaaggactccattggctggatgttctccaagctggacaccagtgctgacctcttcctggaccagacggagctggccgccatcaacctggacaagtacgaggtctgcatccgtcccttcttcaactcctgtgacacctacaaggatggccgggtctctactgctgagtggtgcttctgcttctggagggagaagcccccctgcctggcagagctggagcgcatccagatccaggaggccgccaagaagaagccaggcatcttcatcccgagctgcgacgaggatggctactaccggaagatgcagtgtgaccagagcagcggtgactgctggtgtgtggaccagctgggcctggagctgactggcacgcgcacgcatgggagccccgactgcgatgacatcgtgggcttctcgggggactttggaagcggtgtcggctgggaggatgaggaggagaaggagacggaggaagcaggcgaggaggccgaggaggaggagggcgaggcaggcgaggctgacgacgggggctacatctggtagacgccctcagragccggctgccgggggggactcaacagcagagctctgagcagcagcaggcaacttcgagaacggatccagaaatgcagtcagaaggaccctgctccacctggggggactgggagtgtgagtgtgcatggcatgtgtgtggcacagatggctgggacgggtgacagtgtgagtgcatgtgtgcatgcatgtgtgtatgtgtgtgtgtgtgtggcatgcgctgacaaatgtgtccttgatccacactgctcctggcagagtgagtaacccaaaggccccttcggcctccttgtagctgttttctttccttttgttgttggttttaaaatacattcacacacaaatacaaattgacaggtcaaaatccatgaaatgagatcccccagccgtgtcctccagcccagccctgaccccttggtttctaccctggctccccttggtttctaccctggctcaaccgacccctgtctgcccttctccctcytgcttctgaggtcaagctctggcctgcgagcctgtccccattgcaaaggggagggaggggcagggagctgtctaccagctgaggtcctcccaaaactgggccgatgtggtgtgacatccccaccagcctcagatgagacgggccaggacgcccagccacagmaagccctgtcccttygccggatccccamamactagagaagctctcctaacccaaggcggagaantgnamggtggtggcggcasaggcggagggcagcaaaggacaggccggcaccacgggagcccacgacaagcgcgctcaggtctgacacaggtggcccagtggagcaggtagaacaantanntnnnng

SEQ ID NO: 2363 - DNA, 261 bp, Homo sapiens
ggtgtgccagcagcctggagagcctcagtccctgtagccccctgccctggcacagctgcatgcacttcaagggcagcctttgggggttggggtttytgccmcttccgggtytaggccctgccccaaatccagccagtyctgccccagcccmcccccmcattggagccctcctgytgctttggtgcctcaaataaatacagatgtcccccraaaaaaaaaaaaaaaaaaaaaaaaaaaaaaaaaaaaaaaaaaaaaaaaaaa

SEQ ID NO: 2364 - DNA, 1195 bp, Homo sapiens
  misc_feature (836)..(836): n equals a,t,g, or c
ccacgcgtccggggagctccgccaggctgctggtacctgcgtccgcccggcggacaggctgctttggtttgtgacctccaggcaggacggccatcctctccagaatgaagatcttcttgccagtgctgctggctgcccttctgggtttggagcggagccagctcgctgatgtgcttctcctgcttgaaccagaaagagcaatctgtactgcctgaagccgaccatctgctcccgaccaggaacaactactgcgttgactgtgtcttgctagtgccggcattgggaatctcgtgacatttggccacagcctgagcaagacctgttccccggcctgccccatcccagaaggcgtcaatgttggtgtggcttccatgggcatcagctgctgccagagctttctgtgcaatttcagtgcggccgatggcgggctgcgggcaagcgtcaccctgctgggtgccgggctgctgctgagcctgctgccggccctgctgcggtttggcccctgaccgcccagaccctgtcccccgatcccccagctcaggaaggaaagcccagccctttctggatcccacagtgtatgggagcccctgactcctcacgtgcctgatctgtgcccttggtcccaggtcaaggcccacccccttgcacctccacctgccccagcccctgcctctgccccaagtggggccagctgccctcacttctggggtggatgatgtgaccttccttgggggactgcggaagggacgagggttccctggagtcttacggtccaacatcaggaccaagtcccatggacatgctgacagggtccccaggggagaccgtgtcagtanggatgtgtgcctggctgtgtacgtgggtgtgcagtgcacgtgagagcacgtggcggcttctgggggccatgtttggggagggaggtgtgccagcagcctggagagcctcagtccctgtagccccctgccctggcacagctgcatgcacttcaagggcagcctttgggggttggggtttctgccacttccgggtctaggccctgccccaaatccagccagtcctgccccagcccacccccacattggagccctcctgctgctttggtgcctcaaataaatacagatgtcccccaaaaaaaaaaaaaaaaaaaaaaaaaaaaaaaaaaaaaaaaaaaaaaaaaaaaaaaaaaaaaaaaaaa

SEQ ID NO: 2365 - DNA, 1534 bp, Homo sapiens
tcgacccacgcgtccgtcttccagggaggcctgggagctgggggggtgtgtctggcagtccctgcagccctgggctctgcggcccctgcgtcctccgcttggctctgccactgcatctgagtgtcttctctcctcacggctccccgcatttctaactctttctgcctcctcgtctcaaagctgttccttcccccgactcaagaatccccggaggcccggaggcctgcagcaggagcggccatgaagaagctgatggtggtgctgagtctgattgctgcagcctgggcagaggagcagaataagttggtgcatggcggaccctgcgacaagacatctcacccctaccaagctgccctctacacctcgggccacttgctctgtggtggggtccttatccatccactgtgggtcctcacagctgcccactgcaaaaaaccgaatcttcaggtcttcctggggaagcataaccttcggcaaagggagagttcccaggagcagagttctgttgtccgggctgtgatccaccctgactatgatgccgccagccatgaccaggacatcatgctgttgcgcctggcacgcccagccaaactctctgaactcatccagccccttcccctggagagggactgctcagccaacaccaccagctgccacatcctgggctggggcaagacagcagatggtgatttccctgacaccatccagtgtgcatacatccacctggtgtcccgtgaggagtgtgagcatgcctaccctggccagatcacccagaacatgttgtgtgctggggatgagaagtacgggaaggattcctgccagggtgattctgggggtccgctggtatgtggagaccacctccgaggccttgtgtcatggggtaacatcccctgtggatcaaaggagaagccaggagtctacaccaacgtctgcagatacacgaactggatccaaaaaaccattcaggccaagtgaccctgacatgtgacatctacctcccgacctaccaccccactggctggttccagaacgtctctcacctagaccttgcctcccctcctctcctgcccagctctgaccctgatgcttaataaacgcagcgacgtgagggtcctgattctccctggttttaccccagctccatccttgcatcactggggaggacgtgatgagtgaggacttgggtcctcggtcttacccccaccactaagagaatacaggaaaatcccttctaggcatctcctctccccaacccttccacacgtttgatttcttcctgcagaggcccagccacgtgtctggaatcccagctccgctgcttactgtcggtgtccccttgggatgtacctttcttcactgcagatttctcacctgtaagatgaagataaggatgatacagtctccataaggcagtggctgttggaaagatttaaggtttcacacctatgacatacatggaatagcacctgggccaccatgcactcaataaagaatgaattttattatgaaaaaaaaaaaaaaaaaaaaaaaaatc

SEQ ID NO: 2366 - DNA, 3233 bp, Homo sapiens
  misc_feature (1495)..(1495): n equals a,t,g, or c
  misc_feature (1502)..(1502): n equals a,t,g, or c
taccggtccggaattcccgggtcgacccacgcgtccgcccaggaggaagctgctgagccatgggcgcctacgcgcgggcttcgggggtctgcgctcgcggctgcctggactcagcaggcccctggaccatgtcccgcgccctgcggccaccgctcccgcctctctgctttttccttttgttgctggcggctgccggtgctcgggccgggggatacgagacatgccccacagtgcagccgaacatgctgaacgtgcacctgctgcctcacacacatgatgacgtgggctggctcaaaaccgtggaccagtacttttatggaatcaagaatgacatccagcacgccggtgtgcagtacatcctggactcggtcatctctgccttgctggcagatcccacccgtcgcttcatttacgtggagattgccttcttctcccgttggtggcaccagcagacaaatgccacacaggaagtcgtgcgagaccttgtgcgccaggggcgcctggagttcgccaatggtggctgggtgatgaacgatgaggcagccacccactacggtgccatcgtggaccagatgacacttgggctgcgctttctggaggacacatttggcaatgatgggcgaccccgtgtggcctggcacattgaccccttcggccactctcgggagcaggcctcgctgtttgcgcaratgggcttcgacggcttcttctttgggcgccttgattatcaagataagtgggtacggatgcagaagctggagatggagcaggtgtggcgggccagcaccagcctgaagcccccgaccgcggacctcttcactggtgtgcttcccaatggttacaacccgccaaggaatctgtgctgggatgtgctgtgtgtcgatcagccgstggtggaggaccctcgcagccccgagtacaacgccaaggagctggtcgattacttcctaaatgtggccactgcccagggccggtattaccgcaccaaccacactgtgatgaccatgggctcggacttccaatatgagaatgccaacatgtggttcaagaaccttgacaagctcatccrgctggtaaatgcgcagcaggcaaaaggaagcagtgtccatgttctctactccacccccgcttgttacctctgggagctgaacaaggccaacctcacctggtcagtgaaacatgacgacttcttcccttacgcggatggcccccaccagttctggaccggttacttttccagtcggccggccctcaaacgctacgagcgcctcagctacaacttcctgcaggtgtgcaaccagctggaggcgctggtgggcctggcggccaacgtgggaccctatggctccggagacagtgcacccctcaatgaggcgatggctgtgctccagcatcacgacgccgtcagcggcacctcccgccagcacgtggccaacgactamgcgcgccastttgcggcaggctgggggccttgcgaggttcttctgagcaacgnctggcgnggctcagaggcttcaaagatcacttcaccttttgccaamagctaaacatcagcatctgcccgctcagccagacggcggcgcgcttccaggtcatcgtttataatcccctggggcggaaggtgaattggatggtacggctgccggtcagcgaaggcgttttcgttgtgaaggaccccaatggcaggacagtgcccagcgatgtggtaatatttcccagctcagacagccaggcgcaccctccggagctgctgttctcagcctcactgcccgccctgggcttcagcacctattcagtagcccaggtgcctcgctggaagccccaggcccgcgcaccacagcccatccccagaagatcctggtcccctgctttaaccatcgaaaatgagcacatccgggcaacgtttgatcctgacacagggctgttgatggagattatgaacatgaatcagcaactcctgctgcctgttcgccagaccttcttctggtacaacgccagtataggtgacaacgaaagtgaccaggcctcaggtgcctacatcttcagacccaaccaacagaaaccgctgcctgtgagccgctgggctcagatccacctggtgaagacacccttggtgcaggaggtgcaccagaacttctcagcttggtgttcccaggtggttcgcctgtacccaggacagcggcacctggagctagagtggtcggtggggccgatacctgtgggcgacacctgggggaaggaggtcatcagccgttttgacacaccgctggagacaaagggacgcttctacacagacagcaatggccgggagatcctggagaggaggcgggattatcgacccacctggaaactgaaccagacggagcccgtggcaggaaactactatccagtcaacacccggatttacatcacggatggaaacatgcagctgactgtgctgactgaccgctcccaggggggcagcagcctgagagatggctcgctggagctcatggtgcaccgaaggctgctgaaggacgatggacgcggagtatcggagccactaatggagaacgggtcgggggcgtgggtgcgagggcgccacctggtgctgctggacacagcccaggctgcagccgccggacaccggctcctggcggagcaggaggtcctggcccctcaggtggtgctggccccgggtggcggcgccgcctacaatctcggggctcctccgcgcacgcagttctcagggctgcgcagggacctgccgccctcggtgcacctgctcacgctggccagctggggccccgaaatggtgctgctgcgcttggagcaccagtttgccgtaggagaggattccggacgtaacctgagcgcccccgttaccttgaacttgagggacctgttctccaccttcaccatcacccgcctgcaggagaccacgctggtggccaaccagctccgcgaggcagcctccaggctcaagtggacaacaaacacaggccccacaccccaccaaactccgtaccagctggacccggccaacatcacgctggaacccatggaaatccgcactttcctggcctcagttcaatggaaggaggtggatggttaggtctgctgggatgggccctccaagcccaagcctcctgctccgggggcagaccagactctgactctcctcttggggctgctgccattaaaacgctactactaagactcaaaaaaaaaaaaaaaaaaaaaaaaaaaaaaaa

SEQ ID NO: 2367 - DNA, 1616 bp, Homo sapiens; identical to SEQ ID NO: 1317
  misc_feature (1561)..(1561): n equals a,t,g, or c

SEQ ID NO: 2368 - DNA, 774 bp, Homo sapiens
  misc_feature (688)..(688): n equals a,t,g, or c
  misc_feature (744)..(745): n equals a,t,g, or c
tcgacccacgcgtccgggtgacccccctggggaggaaggcgatggcccctgcgaggacgatggcccgcgcccgcctcgccccggccggcatccctgccgtcgccttgtggcttctgtgcacgctcggcctccagggcacccaggccgggccaccgcccgcgccccctgggctgcccgcgggagccgactgcctgaacagctttaccgccggggtgcctggcttcgtgctggacaccaacgcctcggtcagcaacggagctaccttcctggagtcccccaccgtgcgccggggctgggactgcgtgcgcgcctgctgcaccacccagaactgcaacttggcgctagtggagctgcagcccgaccgcggggaggacgccatcgccgcctgcttcctcatcaactgcctctacgagcagaacttcgtgtgcaagttcgcgcccagggagggcttcatcaactacctcacgagggaagtgtaccgctcctaccgscagctgcggacccagggctttggagggtctgggatccccaaggcctgggcaggcatagacttgaaggtacaaccccaggaacccctggtgctgaaggatgtggaaaacacagattggcgcctactgcggggtgacacggatgtcagggtagagaggaaagacccaaaccaggtgggaactggtggggacttmaaggnaaggcacctaacctggttccaggttgacaaggggactaactttaaraaccacccannagggacacggggccaaaaggttaacaagt

SEQ ID NO: 2369 - DNA, 797 bp, Homo sapiens
  misc_feature (728)..(728): n equals a,t,g, or c
  misc_feature (740)..(740): n equals a,t,g, or c
  misc_feature (785)..(785): n equals a,t,g, or c
ggaaagacccaaaccaggtggaactgtggggactcaaggaaggcacctacctgttccagctgacagtgactagctcagaccacccagaggacacggccaacgtcacagtcactgtgctgtccaccaagcagacagaagactactgcctcgcatccaacaaggtgggtcgctgccggggctctttcccacgctggwactatrccccacgagcagatctgcaagagtttcgtttatggakgctgcttgggyaacaasaacaactaccttcgggaagaagagtgcattctagcctgtcggggtgtgcaaggtgggcctttgagaggcagctctggggctcaggcgactttcccccagggcccctccatggaaaggcgccatccagtgtgctctggcacctgtcagcccacccagttccgctgcagcaatggctgctgcatcgacagtttcctggagtgtgacgacacccccaactgccccgacgcctycgacgaggctgcctgtgaaaaatacacgagtggctttgacgarctycarcgcatycatttycccagtgacaaagggcactgcgtggacctgccagacacaggactctgcaaggagagcatcccgcgctggtactacaaccccttcagcgaacactgcgcccgctttacctatggtggttgttatggcaacaagaacaactttgaggaagagcagcagtgcctcgagtcttgtcgcggcatctncaagaaggatgngtttggcctgaggcgggaaatccccattcccagcacaggctctgnggagaatggctg

SEQ ID NO: 2370 - DNA, 175 bp, Homo sapiens
  misc_feature (143)..(143): n equals a,t,g, or c
gcggacgcgtgggcggacgcgtgggcggacgcgtggggtacgtgccctgctgggggccttactttatagaatgagagcatccgagcttccctaatgaatctggctagttctgtgtctggctgaggatacaggagtgggacatncactctcggatccctcagagcacagaaacctt

SEQ ID NO: 2371 - DNA, 829 bp, Homo sapiens
  misc_feature (41)..(41): n equals a,t,g, or c
  misc_feature (45)..(46): n equals a,t,g, or c
aactaatacgaactcactcatagggaaaactggtacgcctntttnnataccggtccggaattcccgggtcgacccacgcgtccgaagagaacaaacccgaaaagagtgtgagctaactagtttccaaagcggagacttccgacttccttacaggatgaggctgggcattgcctgggacagcctatgtaaggccatgtgccccttgccctaacaactcactgcagtgctcttcatagacacatcttgcagcatttttcttaaggctatgcttcagtttttctttgtaagccatcacaagccatagtggtaggtttgccctttggtacagaaggtgagttaaagctggtggaaaaggcttattgcattgcattcagagtaacctgtgtgcatactctagaagagtagggaaaataatgcttgttacaattcgacctaatatgtgcattgtaaaataaatgccatatttcaaacaaaacacgtaatttttttacagtatgttttattaccttttgatatctgttgttgcaatgttagtgatgttttaaaatgtgatcgaaaatataatgcttctaagaaggaacagtagtggaatgaatgtctaaaagatctttatgtgtttatggtctgcagaaggatttttgtgatgaaaggggattttttgaaaaatctagagaagtagcatatggaaaattataatgtgtcttttttacaatgacttcagctctgtttttagctagaaactctaaaaacaaaaataataataaagaaaaataaataaaaaggagaggcagacgcggccgcgaattcccgggtcgacgagctcactagt

SEQ ID NO: 2372 - DNA, 745 bp, Homo sapiens
  misc_feature (31)..(31): n equals a,t,g, or c
  misc_feature (698)..(698): n equals a,t,g, or c
  misc_feature (704)..(704): n equals a,t,g, or c
  misc_feature (731)..(731): n equals a,t,g, or c
  misc_feature (742)..(742): n equals a,t,g, or c
  misc_feature (744)..(744): n equals a,t,g, or c
tgagttgttagggcaaggggcacatgccctnacataggctgtccccaggcaatgcccagcctcatcctgtaaggaagtcggaagtctccgctttggaaactagttagctcacactcttttcgggtttgttctcttctgggcactcctagttttaatgttcttcttgggactggctggtttgggagcaggagtctttccctttggtttggggggattactacgactggtgcgcccggctgtttttctttcttgtccctgaactgttctccgctgttcctgcagcctctcttcccactgtatggatcttttactaagctgatctctccatttttcaactaagcaattttcaagaagcatcatccttgagcgccactcgtaacacatgatgagaacatcttgatggggcaggatgtgtggacactggcaagaagaatttgtaatgagcgggacttgagttcgagggatgggtgatgaggacttgaagatctcttttacatccaccaccgttgtgacctcattgcagccactcctctgcacagcttttattttggcatgaataacatagctgtagtttttgctkagatatgkkgccmaagttggcttcacctttttacacttgcaccgatcggggcttaggcgtttacagtcaacatcaagaggcctttcctgtaccatcatgtctggtgtgatgtctatcnacttgncatcctaaggaaatccggggaattccnttcgagtaacntnc

SEQ ID NO: 2373 - DNA, 2691 bp, Homo sapiens
  misc_feature (2671)..(2671): n equals a,t,g, or c
  misc_feature (2673)..(2673): n equals a,t,g, or c
ctatagaaggtacgcctgcaggtaccggtccggaattcgcggccgcgtcgacgccacccagctccccgccaccgccatggtccccgacaccgcctgcgttcttctgctcaccctggctgccctcggcgcgtccggacagggccagagcccgttgggctcagacctgggcccgcagatgcttcgggaactgcaggaaaccaacgcggcgctgcaggacgtgcgggagctgctgcggcagcaggtcagggagatcacgttcctgaaaaacacggtgatggagtgtgacgcgtgcgggatgcagcagtcagtacgcaccggcctacccagcgtgcggcccctgctccactgcgcgcccggcttctgcttccccggcgtggcctgcatccagacggagagcggcgcgcgctgcggcccctgccccgcgggcttcacgggcaacggctcgcactgcaccgacgtcaacgagtgcaacgcccacccctgcttcccccgagtccgctgtatcaacaccagcccggggttccgctgcgaggcttgcccgccggggtacagcggccccacccaccagggcgtggggctggctttcgccaaggccaacaagcaggtttgcacggacatcaacgagtgtgagaccgggcaacataactgcgtccccaactccgtgtgcatcaacacccggggctccttccagtgcggcccgtgccagcccggcttcgtgggcgaccaggcgtccggctgccagcggcgcgcacagcgcttctgccccgacggctcgcccagcgagtgccacgagcatgcagactgcgtcctagagcgcgatggctcgcggtcgtgcgtgtgtgccgttggctgggccggcaacgggatcctctgtggtcgcgacactgacctagacggcttcccggacgagaagctgcgctgcccggagcgccagtgccgtaaggacaactgcgtgactgtgcccaactcagggcaggaggatgtggaccgcgatggcatcggagacgcctgcgatccggatgccgacggggacggggtccccaatgaaaaggacaactgcccgctggtgcggaacccagaccagcgcaacacggacgaggacaagtggggcgatgcgtgcgacaactgccggtcccagaagaacgacgaccaaaaggacacagaccaggacggccggggcgatgcgtgcgacgacgacatcgacggcgaccggatccgcaaccaggccgacaactgccctagggtacccaactcagaccagaaggacagtgatggcgatggtataggggatgcctgtgacaactgtccccagaagagcaacccggatcaggcggatgtggaccacgactttgtgggagatgcttgtgacagcgatcaagaccaggatggagacggacatcaggactctcgggacaactgtcccacggtgcctaacagtgcccaggaggactcagaccacgatggccagggtgatgcctgcgacgacgacgacgacaatgacggagtccctgacagtcgggacaactgccgcctggtgcctaaccccggccaggaggacgcggacagggacggcgtgggcgacgtgtgccaggacgactttgatgcagacaaggtggtagacaagatcgacgtgtgtccggagaacgctgaagtcacgctcaccgacttcagggccttccagacagtcgtgctggacccggagggtgacgcgcagattgaccccaactgggtggtgctcaaccagggaagggagatcgtgcagacaatgaacagcgacccaggcctggctgtgggttacactgccttcaatggcgtggacttcgagggcacgttccatgtgaacacggtcacggatgacgactatgcgggcttcatctttggctaccaggacagctccagcttctacgtggtcatgtggaagcagatggagcaaacgtattggcaggcgaaccccttccgtgctgtggccgagcctggcatccaactcaaggctgtgaagtcttccacaggccccggggaacagctgcggaacgctctgtggcatacaggagacacagagtcccaggtgcggctgctgtggaaggacccgcgaaacgtgggttggaaggacaagaagtcctatcgttggttcctgcagcaccggccccaagtgggctacatcagggtgcgattctatgagggccctgagctggtggccgacagcaacgtggtcttggacacaaccatgcggggtggccgcctgggggtcttctgcttctcccaggagaacatcatctgggccaacctgcgttaccgctgcaatgacaccatcccagaggactatgagacccatcagctgcggcaagcctagggaccagggtgaggacccgccggatgacagccaccctcaccgcggctggatgggggctctgcacccagccccaaggggtggccgtcctgagggggaagtgagaagggctcagagaggacaaaataaagtgtgtgtgcagggaaaaaaaaaaaaaaaaaaaaaaaaaaaaaaaaaaaaaaaaaaaaaaaaaaaaaaaaaaaaaaaaaaaaaaagtcgacgcggccgcgaattcccgggtcgacgagctcactagtcggcggccgctctagaggatccctcgaggggcccaagcttacgcgtgcatgcgacgtcatagctctncnccctatagtgggtcgtac

SEQ ID NO: 2374 - DNA, 3685 bp, Homo sapiens
  misc_feature (3534)..(3534): n equals a,t,g, or c
  misc_feature (3610)..(3610): n equals a,t,g, or c
  misc_feature (3655)..(3655): n equals a,t,g, or c
  misc_feature (3661)..(3662): n equals a,t,g, or c
tcgacccacgcgtccgcccacgcgtccgagtwaacgcgcgactccagcgcgcggctacctacgcttggtgcttgctttctccagccatcggagaccagagccgccccctctgctcgagaaaggggctcagcggcggcggaagcggagggggaccaccgtggagagcgcggtcccagcccggccactgcggatccctgaaaccaaaaagctcctgctgcttctgtaccccgcctgtccctcccagctgcgcagggccccttcgtgggatcatcagcccgaagacagggatggagaggcctctgtgctcccacctctgcagctgcctggctatgctggccctcctgtcccccctgagcctggcacagtatgacagctggccccattaccccgagtacttccagcaaccggctcctgagtatcaccagccccaggcccccgccaacgtggccaagattcagctgcgcctggctgggcagaagaggaagcacagcgagggccgggtggaggtgtactatgatggccagtggggcaccgtgtgcgatgacgacttctccatccacgctgcccacgtcgtctgccgggagctgggcyacgtggaggccaagtcctggactgccagctcctcctacggcaagggagaagggcccatctggttagacaatctccactgtactggcaacgaggcgacccttgcagcatgcacctccaatggctggggcgtcactgactgcaagcacacggaggatgtcggtgtggtgtgcagcgacaaaaggattcctgggttcaaatttgacaattcgttgatcaaccagatagagaacctgaatatccaggtggaggacattcggattcgagccatcctctcaacctaccgcaagcgcaccccagtgatggagggctacgtggaggtgaaggagggcaagacctggaagcagatctgtgacaagcactggacggccaagaattcccgcgtggtctgcggcatgtttggcttccctggggagaggacatacaataccaaagtgtacaaaatgtttgcctcacggaggaagcagcgctactggccattctccatggactgcaccggcacagaggcccacatctccagctgcaagctgggcccccaggtgtcactggaccccatgaagaatgtcacctgcgagaatgggctaccggccgtggtgagttgtgtgcctgggcaggtcttcagccctgacggaccctcragattccggaaagcgtacaagccagagcaacccctggtgcgactgagaggcggtgcctacatcggggagggccgcgtggaggtgctcaaaaatggagagtgggggaccgtctgcgacgacaagtgggacctggtgtcggccagtgtggtctgcagagagctgggctttgggagtgccaaagaggcagtcactggctcccgactggggcaagggatcggacccatccacctcaacgagatccagtgcacaggcaatgagaagtccattatagactgcaagttcaatgccgagtctcagggctgcaaccacgaggaggatgctggtgtgagatgcaacacccctgccatgggcttgcagaagaagctgcgcctgaacggcggccgcaatccctacgagggccgagtggaggtgctggtggagagaaacgggtcccttgtgtgggggatggtgtgtggccaaaactggggcatcgtggaggccatggtggtctgccgccagctgggcctgggattcgccagcaacgccttccaggagacctggtattggcacggagatgtcaacagcaacaaagtggtcatgagtggagtgaagtgctcgggaacggagctgtccctggcgcactgccgccacgacggggaggacgtggcctgcccccagggcggagtgcagtacggggccggagttgcctgctcagaaaccgcccctgacctggtcctcaatgcggagatggtgcagcagaccacctacctggaggaccggcccatgttcctgctgcagtgtgccatggaggagaactgcctctcggcctcagccgcgcagaccgaccccaccacgggctaccgccggctcctgcgcttctcctcccagatccacaacaatggccagtccgacttccggcccaagaacggccgccacgcgtggatctggcacgactgtcacaggcactaccacagcatggaggtgttcacccactatgacctgctgaacctcaatggcaccaaggtggcagagggccacaaggccagcttctgcttggaggacacagaatgtgaaggagacatccagaagaattacgagtgtgccaacttcggcgatcagggcatcaccatgggctgctgggacatgtaccgccatgacatcgactgccagtgggttgacatcactgacgtgccccctggagactacctgttccaggttgttattaaccccaacttcgaggttgcagaatccgattactccaacaacatcatgaaatgcaggagccgctatgacggccaccgcatctggatgtacaactgccacataggtggttccttcagcgaagagacggaaaaaaagtttgagcacttcagcgggctcttaaacaaccagctgtccccgcagtaaagaagcctgcgtggtcaactcctgtcttcaggccacaccacatcttccatgggacttccccccaacaactgagtctgaacgaatgccacgtgccctcacccagcccggcccccaccctgtccagacccctacagctgtgtctaagctcaggaggaaagggaccctcccatcattcatggrgggctgctacctgacccttggggcctgagaaggccttgggggggtggggtttgtccacagagctgctggagcagcaccaagagccagtcttgaccgggatgaggcccacagacaggttgtcatcagcttgtcccattcaagccaccgagctcaccacagacacagtggagccgcgctcttctccagtgacacgtggacaaatgcgggctcatcagcccccccagagagggtcaggccgaaccccatttctcctcctcttaggtcattttcagcaaacttgaatatctagacctctcttccaatgaaaccctccagtctattatagtcacatagataatggtgccacgtgttttctgatttggtgagctcagacttggtgcttccctmtccacarcccccaccccttgtttttcaagatactattattatattttcacagacttttgaagcacaaatttattggcatttaatattggacatctgggcccttggaagtacaaatctaaggaaaaaccaacccactgtgtaagtgactcatcttcctgttgttccaattctgtgggtttttgattcaacggtgctataaccagggtcctgggtgacagggcgctcactgagcaccatgtgtcatcacagacacttacacatacttgaaacttggaataaaagaaagatttatgaaacgtgtctgtgtttcctttgacccacagcacctgggccctgagcagcaggcttcctatgntcagtggccagaagcagagcttcaggtacattcatggttttctccggtggacatgggtcctcagatcccctccagnccagtgtggccaccagggcacctccttcaatagactccaaaaggngcaggnnctaccatctggggagaagcagtc

SEQ ID NO: 2375 - DNA, 2153 bp, Homo sapiens
  misc_feature (24)..(24): n equals a,t,g, or c
ttagtaaatgaagggcaattctanaatgcaaaataaaaatggaattaaggcagctttaaaagaaaataaaactcatccacccaaaatagtgctacataattcattacttaaaaagctctctgtggagtatagacataaagccaaaaataaaaacaaacattgcagttgtgatgcagcatcaggtgcttttacttcagtgaatgaaaaataatggtcacaactcaaatgaatgggaatttaatatgaatatatgcaccttaccagagatgtttgctaccaatgatatcttagcaattccatattccttacaaagtcagtataattgttgtaraaaaatcaactgtggttctgaatacccattcacagttgacctcaacaatgtatctgatgtaggagactgagtatccgtgacaggcagaagcatgtgatggtcctcagtcccaagtggaagagctaatggtaaagtcatatcagaaggcttcacatccatagtttctgataaaggacttttttgtawgraawmctgttcactcaaagtatgatcctctgcactggagtctagagttttatctgcaccagaatggacttttgttttgtgcttctttaaatttttaatatctgtgtaagaatttccacataattcgcagataaatggtctttctcctgtatgttttcgagaatgagtgataagagaactagagacagcaaatgccttcccacaggtatcacatacataaggcttttctccagtatgcctacggacatgataggtcagtgtgctggcttgagcaaatctctgtccacacctatcacagacatatggcttctctccactatgcttccttgcatgaatcttgagattgctagaagttgcaaactgtaagttgcatacatcacatttatagggtttttcttcaccatgatgcatgcgactatggaagactagctgacatttctgagcaaatcctttatcacacaattcacatttgtatggcttctcacctgtatgagttcttacatgcgttttcagctggttacattgggtaaatgcctttccacataagtggcagacgtaaggtttgactcctttatgtattctcatgtgccttctcaaactgctggcttctgaaaacactttcccacatgtgttacacattggcttggccttggaatacctctgatccagctcttccccggagttctccgcctcataaggactcttgacgctggctatattagacatagagtgttctttcagagcacagtttggctgtgattttccacgtttccgtttcactgtaacagtgtgcacaatatcttgtgctggaaaagtattttccacaactgatgtcaactcgagttctgaattatcatttatttgtgcaacttgttctactacaggtgtgggcagtttatttgcatctaggaataattcaacagatgcattctctaagatgtcactgggatattgcactgttttattctgccctgttttcggggagttgaaagccttcttcttctttttcgtttgagatgactttttcgctaacgcgccttgtttaggatttgcctgaatcaaatctgtagatacttctgatttctctcgattattataatctcgcagagtaagaagacaagtctgttgattcaattcaatgtttccagtaatactagatatctctgtagaagaaggattagcaataaaagcaaaatcttccatctttattttgcatttagtgaccacctcttccactttgagatagtcagcagcctgatgaatttctttaacattccaactgtcaagatttaaagttcctgtgtatataaactccaacagtttctgaaatccatcagccttcacctgactctgatcaagaaagacattgttctcagaagtgcttctgtagatcgcaccaaaatactcactaaaggaggccagcacattcctatgagctttaaactggaattccccaatcactatggtacagtcacagagaaaacctgcttcccgctgtttgttcagtctctctaaaaggtgctcacartggtgcgaatactgcattttgatatcagaatggaattttacccttgatcgatagcaacccaaggggggaacacagtttcttcactctgtctccgccatcttgggagag

SEQ ID NO: 2376 - DNA, 955 bp, Homo sapiens
  misc_feature (11)..(12): n equals a,t,g, or c
  misc_feature (14)..(14): n equals a,t,g, or c
  misc_feature (49)..(49): n equals a,t,g, or c
  misc_feature (53)..(53): n equals a,t,g, or c
  misc_feature (584)..(584): n equals a,t,g, or c
gattaaaaggnntnaaagatcaaaccaactcatttggttttttaccctngcantgaatcttgagattgctagaagttgcaaactgtaagttgcatacatcacatttatagggtttttcttcaccatgatgcatacgactatggaagactagctgacatttctgagcaaatcctttatcacacaattcacatttgtatggcttctcacctgtatgagttcttacatgcgttttcagctggttacattgggtaaatgcctttccacataagtggcagacgtaaggtttgactcctttatgtattcycatgtgccttctcaaactgctggcttctgaaaacactttcccacatgtgttacacattggcttggccttggaatacctctgatccagctcttccccggagttctccgcctcataaggactcttgacgctggctatattagacatagagtgttctttcagagcacagtttggctgtgattttccacgtttccgtttcactgtaacagtgtgcacaatatcttgtgctggaaaagtattttccacaactgatgtcaactcgagttctgaattatcatttatntgtgcaacttgttctactacaggtgtgggcagtttatttgcatctaggaataattcaacagatgcattctctaagatgtcactgggatattgcactgttttattctgccctgttttcggggagttgaaagccttcttcttctttttcgtttgagatgacttctttcctaacgcgccttgtttaggatttgcctgaatcaaatctgtagatacttctgatttctctcgattattataatctcgcagagtaagaagacaagtctgttgattcaattcaatgtttccagtaatactagatatctctgtagaagaaggattagcaataaaagcaaaatctgtcgacgcggccgcgaattcccgggtcgacgagct

SEQ ID NO: 2377 - DNA, 2302 bp, Homo sapiens
  misc_feature (6)..(6): n equals a,t,g, or c
agggcnattgggtacgggcccccctcgagtttttttttttttttttttttaatccccagctcatatttatttgggcacagagtgggcactcaaatatctgatgaacttgatgaactgaaaagaggtctccttaaacaagatatcatctcccgaagagagaagtcccaaccatataaaatgtatgatcaagtcccagaaaactttgccttcccaaggaatgtgtttctaatttggtttcaaagcacactggttcccacttttaccactttcatgacattggacaatagtactactcttttctacttttcttccagacctggggacttgatattctcttagcctcatatcatctttgcaaggagttcacagagaggattattctccatcttacaaatagaactgaggcccagaaggaaatcccttagtgtctttttgatggaacacagttctgtgatgggaagctatcccagtctcccatccttgcaaaactgctgcttagtactcaggtgttctctaggttgttctggaacatttacaaacttctttgggtgtgaggatgtgctgccacaaggccaaaaatcacattctctctctctctcctctcctctctaccattctcctcagtgccaggtggggacagattccacccactgggcctgggaggaagaaaagcaccttggccactagtcagggaggagtcacagccagcaagaagagagagacctaagtagacaagagtagtttcaatgggaagaagcagggccaccagtaagaaaaccaggagactccttctgaaaggcttccacctgggaggaaagatggcagcagtgccatgaggaggccagatccctcctcctcaatcctctgcgccgggccctcccagagtcacttcttcagggcacccaggctcttcagggtctcttgggcctgggtcagctgctgctgcagcctctggcgggtgctctcgttggaggcccgcttcaggtggccctgcatctcctccaccatggctcggtggccaggagtgttgtgaaacagccgcaccgcccggtccccacaggaggccagaaagcggccagtgatgtcaaaggacaagttggcgatacactcgccatggacccgctcaaagcactcctccttctcgccccgccgggtattgtagagatgaatactactgccactggccaaggccaagacctgggcgttgggggagagggccaggcggcacggcgcggcacccgccgcctcttcaaagcggcctgtcttcagcaagtaggggtcctgcttcttcttgtattccacatctgtgtcccacagtttccatgtaccatccttggagacagaagccatcctccgtgagtcgttggagaaagcaaacgagtgcacagccgcggagtggccctttagttcgaaggctcgcaccacctcctggaactcccccttctttccaaagcagacttcccaaaccttcacatctggggtgaagccacacgaggctacaaatctgccacagggagatacagcagcgtgtgtgttgttcatctggttggtgttgatggtagacagcacttgacccttcaggctccagatgaggacagtggtgtcactggaggcagtcatgataaacttccctgtgttagcaatgccaatgtcgatgacaggcgccttgtgctttttagggaagtcctctggggtggctgtgaaggtgtagcccccatcctcccgcttggtcatcttgaagacacggagggtgtccccgttggccagccagacgatgaaggctctgcagtcagggctgaagcgcaccagggtggcgtggtccagctccacgttggctctcatgctgcggtgctctcgctgcaggaagtccttggtgctccagatgcggatggtgcgatcatctgcacaggtagccaggtatttgccattgctgctaaagtccatgcaagatatgttcccgctgtggctcttcagagctgcagccaggaggcggtgggtgaagttgtgttgttgaggcttctccttccgaatccgctgatattgtttctgcttcttggatcccgaagatttgtcaggtggaaatccatttgctttttggcaggcgggccggccgctcctctcctcccccgcgcgcagccacccccgcgctaccgccgccgtcgccatcagggccagcagcccaagcaacaccgacagccccatgagctscgacatctgcgagagctccatgttggtgctcgtgccgaattcctrcagcmcgggggatccactagttctagagcggccgccaccgcggggagct

SEQ ID NO: 2378 - DNA, 2834 bp, Homo sapiens
  misc_feature (12)..(12): n equals a,t,g, or c
  misc_feature (35)..(35): n equals a,t,g, or c
  misc_feature (39)..(39): n equals a,t,g, or c
gtagctgtgcangcagacaagtcttctgccagacncggnatggcatcaccttaccatcagagcagtgcagtgctcttccgagacctgtgagcacccagaactgctggtcagaggcctgcagtgtacactggagagtcagcctgtggaccctgtgcacagctacctgtggcaactacggcttccagtcccggcgtgtggagtgtgtgcatgcccgcaccaacaaggcagtgcctgagcacctgtgctcctgggggccccggcctgccaactggcagcgctgcaacatcaccccatgtgaaaacatggagtgcagagacaccaccaggtactgcgagaaggtgaaacagctgaaactctgccaactcagccagtttaaatctcgctgctgtggaacttgtggcaaagcgtgaagatagggtgtggggaaaaactctaccctggccacacgaaggactcacgcaaccacctcggacagaacctaagctttcttcattttatttatttatttccccctccccactccacacacacccttccaacctcctccacctccaccttcaagcataaggacgtccgcgtgttttctctttcagttagctggaggacaggatgttgggaaaggaaaggacagatgtctaaaggaggttgcagagcaggccaggcagacagtgggggctcccttgaagagcttcctccctcccaaacctgggtctcaaagacctagaaagaggcaggcacagcccctgcggacagcagggagccagaaggtttgtagcctattggtgcaaacattggacaaattcctgtgtctttcctagaagcacactatcacaaacacaggagtgttttgctcctttgtctcctcttccccatctatgtccctttagtcacagttaggacaaatggggaggggacaccatgctgaggcagaaactagcccagaactcactcagttcttctagtgggtgagtgcagagagagaagaactcagatcaccagtagggagaggtaaaaaagcaaacaaagcaggctctaaggcacacaacattgcagaaaatgaggaagggaggggagggaagggacagaagcaaaaaggagcctgtggtgttccccagtggggcagggtgagcaggggcttccaggctgcatgaggctcatggaccagctctgatcccatgcatgtgcgcatgctcagagccctgctgcccacaacagagcactgcgctgcgtgggagtccccacttcccaggctatcagagtcaacgtcctgcctgtgcagctgcagcaaagccagtgagaggtgggtctcgccatgcagtaaggccaccctggcacctctttatctaaatccgaagtcccctagccccgcactaactaactgctgctgtgggccagggccattttgagcatgaatggcccaggttttttgccttctaggacctttgctgctccaccgaagggccagggactatggttaacttatcaacatcaacccattaactagtcactgtgccagagagtatctgtcaggctgtcaggctgtcaggttgtagcaacctcttcattccagagctggcccagggaccggggtgggacaatgggtttatgcgtgtccacagtacaccctccctctcccagcctccaccccagggtctgcaggtcctccggcatgtagtatttatctagcaaggcggggtggtggaggcagcaccctggcaaagcagctcacacactgcagccacactcatcagctgtggtgaggcggctggagcaaagtcaaagtcatgcagcaaaatgaaaactctgggactcttcggcaaaatcctcattaagccgagcagctttggccaagtaatttttgcctccttccctcgcgtggcctgagtttaggagcaagggtggccagagtcccttacccacagataagcctcccctcatgaaatgccactcaccccgggctaccattgacatcagggctgcatttccagccagcctggaagtaaaatttgagaggaagacaatattaatctgtgtccccacctagtgagctgtggacaggtttaagttgggtctccttcttcttcaccacaaaaacaggctctaagaaatcatgttactaaaaaatcagtgtaaagtctgtttaaaataaaaaagaatgttttctatgtctgtatatcttttgtgaatatttattaggatttcttattaaaaaagtgcaatattaataattgtacattgtcatccagaaacmaaactattkgggggrctttattaactaacttcctgcagttgtgttcctgtaaactcagtagtgattattatatttttcctatttttaatagaacctggtgtttaactctggatccattcactgtacaggatgtgttgtaaaaactaacatgggatgctgaggcagtaagagggaattcatttgtggcataatagttatgcatggaatgataaagacagacaaattccatactactactaatgtggttaattatttctagttcgatagtgattgaaaatcagtggtcactatttacatttcctaaagagcaagcatcctccagctccatgttgggttggagcagttggcagtgggtctcagtgagctggcagaacctaggtttgggtgggaagcagaatgctcgttgcatgaaatgaatgtacatttaatgtttgttctgtgaattgcaactcagcagcaccacaagacaatgaaggctgctggctaatgtggaaggaggcactttctcctctaaaacacaaaactgtatttgtattttttgtacagataatacagcttatttatttaaaaaaaaaaaaaaaaa

SEQ ID NO: 2379 - DNA, 4827 bp, Homo sapiens
  misc_feature (3795)..(3795): n equals a,t,g, or c
gacggcagaggagcacttagcagcttattcagtgtccgattctgattccggcaaggatccaagcatggaatgctgccgtcgggcaactcctggcacactgctcctctttctggctttcctgctcctgagttccaggaccgcacgctccgaggaggaccgggacggcctatgggatgcctggggcccatggagtgaatgctcacgcacctgcgggggtggggcctcctactctctgaggcgctgcctgagcagcaagagctgtgaaggaagaaatatccgatacagaacatgcagtaatgtggactgcccaccagaagcaggtgatttccgagctcagcaatgctcagctcataatgatgtcaagcaccatggccagttttatgaatggcttcctgtgtctaatgaccctgacaacccatgttcactcaagtgccaagccaaaggaacaaccctggttgttgaactagcacctaaggtcttagatggtacgcgttgctatacagaatctttggatatgtgcatcagtggtttatgccaaattgttggctgcgatcaccagctgggaagcaccgtcaaggaagataactgtggggtctgcaacggagatgggtccacctgccggctggtccgagggcagtataaatcccagctctccgcaaccaaatcggatgatactgtggttgcaattccctatggaagtagacatattcgccttgtcttaaaaggtcctgatcacttatatctggaaaccaaaaccctccaggggactaaaggtgaaaacagtctcagctccacaggaactttccttgtggacaattctagtgtggacttccagaaatttccagacaaagagatactgagaatggctggaccactcacagcagatttcattgtcaagattcgtaactcgggctccgctgacagtacagtccagttcatcttctatcaacccatcatccaccgatggagggagacggatttctttccttgctcagcaacctgtggaggaggttatcagctgacatcggctgagtgctacgatctgaggagcaaccgtgtggttgctgaccaatactgtcactattacccagagaacatcaaacccaaacccaagcttcaggagtgcaacttggatccttgtccagccaggtgggaggccaccccatggaccgcgtgctcctcctcgtgtggggggggcatccagagccgggcagtttcctgtgtggaggaggacatccaggggcatgtcacttcagtggaagagtggaaatgcatgtacacccctaagatgcccatcgcgcagccctgcaacatttttgactgccctaaatggctggcacaggagtggtctccgtgcacagtgacatgtggccagggcctcagataccgtgtggtcctctgcatcgaccatcgaggaatgcacacaggaggctgtagcccaaaaacaaagccccacataaaagaggaatgcatcgtacccactccctgctataaacccaaagagaaacttccagtcgaggccaagttgccatggttcaaacaagctcaagagctagaagaaggagctgctgtgtcagaggagccctcgttcatcccaraggcctggtcggcctgcacagtcacctgtggtgtggggacccaggtgcgaatagtcaggtgccaggtgctcctgtctttctctcagtccgtggctgacctgcctattgacgagtgtgaagggcccaagccagcatcccagcgtgcctgttatgcaggcccatgcagcggggaaattcctgagttcaacccagacgagacagatgggctctttggtggcctgcaggatttcgacgagctgtatgactgggagtatgaggggttcaccaagtgctccgagtcctgtggaggaggtgtccaggaggctgtggtgagctgcttgaacaaacagactcgggagcctgctgaggagaacctgtgcgtgaccagccgccggcccccacagctcctgaagtcctgcaatttggatccctgcccagcaaggtgggaaattggcaagtggagtccatgtagtctcacatgtggggtcggcctacagaccagagacgtcttctgcagccacctgctttccagagagatgaatgaaacagtcatcctggctgatgagctgtgtcgccagcccaagcccagcacggtgcaagcttgtaaccgctttaattgccccccagcctggtaccctgcacagtggcagccgtgttccagaacgtgtggcgggggtgttcagaaacgtgaggttctttgcaagcagcgcatggctgatggcagcttcctggagcttcctgagaccttctgttcagcttcaaaacctgcctgccagcaagcatgcaagaaagatgactgtcccagcgagtggcttctctcagactggacagagtgttccacaagctgcggggaaggcacccagactcgaagcgccatttgccgaaagatgctgaaaaccggcctctcaacggttgtcaattccaccctgtgcccgcccctgcctttctcttcctccatcaggccctgtatgctggcaacctgtgcaaggcccgggcggccatccacgaagcacagcccgcacatcgcggccgccaggaaggtctacatacagactcgcaggcagaggaagctgcacttcgtggtggggggcttcgcctacctgctccccaagacggcggtggtgctgcgctgcccggcgcgcagggtccgcaagcccctcatcacctgggagaaggacggccagcacctcatcagctcgacgcacgtcacggtggcccccttcggctatctcaagatccaccgcctcaagccctcggatgcaggcgtctacacctgctcagcgggcccggcccgggagcactttgtgattaagctcatcggaggcaaccgcaagctcgtggcccggcccttgagcccgagaagtgaggaagaggtgcttgcggggaggaagggcggcccgaaggaggccctgcagacccacaaacaccagaacgggatcttctccaacggcagcaaggcggagaagcggggcctggccgccaacccggggagccgctacgacgacctcgtctcccggctgctggagcagggcggctggcccggagagctgctggcctcgtgggaggcgcaggactctgcggaaaggaacacgacctcggaggaggacccgggtgcagagcaagtgctcctgcacctgcccttcaccatggtgaccgagcagcggcgcctggacgacatcctggggaacctctcccagcagcccgaggagctgcgcgacctctacagcaagcacctggtggcccagctggcccaggagatcttccgcagccacctggagcaccaggacacgctcctgaagccctcggagcgcaggacttccccagtgactctctcgcctcataaacacgtgtctggcttcagcagctccctgcggacctcctccaccggggacgccgggggaggctctcgaaggccacaccgcaagcccaccatcctgcgcaagatctcagcggcccagcagctctcagcctcggaggtggtcacccacctggggcagacggtggccctggccagcgggacactgagtgktcttctgcactgtgaggccatcggccacccaaggcctaccatcagctgggccaggaatggagaagaagttcagttcagtgacaggattcttctacagccagatgattccttacagatcttggcaccagtggaagcagatgtgggtttctacacttgcaatgccaccaatgccttgggatacgactctgnctccattgccgtcacattagcaggaaagccactagtgaaaacgtcacgaatgacagtgatcaacacggagaagcctgcagtcacagtcgatataggaagcaccatcaaaacagtgcagggagtgaatgtgacaatcaactgccaggttgcaggagtgcctgaagctgaagtcacttggttcaggaataaaagcaaactgggctccccgcaccatctgcacgaaggctccttgctgctcacaaacgtgtcctcctcggatcagggcctgtactcctgcagggcggccaatcttcatggagagctgactgagagcacccagctgctgatcctagatcccccccaagtccccacacagttggaagacatcagggccttgctcgctgccactggaccgaaccttccttcagtgctgacgtctcctctgggaacacagctggtcctggatcctgggaattctgctctccttggctgccccatcaaaggtcaccctgtccctaatatcacctggtttcatggtggtcagccaattgtcactgccacaggactgacgcatcacatcttggcagctggacagatccttcaagttgcaaaccttagcggtgggtctcaaggggaattcagctgccttgctcagaatgaggcaggggtgctcatgcagaaggcatctttagtgatccaagattactggtggtctgtggacagactggcaacctgctcagcctcctgtggtaaccggggggttcagcagccccgcttgaggtgcctgctgaacagcacggaggtcaaccctgcccactgcgcagggaaggttcgccctgcggtgcagcccatcgcgtgcaaccggagagactgcccttctcggtggatggtgacctcctggtctgcctgtacccggagctgtgggggaggtgtccagacccgcagggtgacctgtcaaaagctgaaagcctctgggatctccacccctgtgtccaatgacatgtgcacccaggtcgccaagccggctgtggacacccaggcctgtaaccagca

SEQ ID NO: 2380 - DNA, 5738 bp, Homo sapiens
gcggccgcgtcgacggcagaggagcacttagcagcttattcagtgtccgattctgattccggcaaggatccaagcatggaatgctgccgtcgggcaactcctggcacactgctcctctttctggctttcctgctcctgagttccaggaccgcacgctccgaggaggaccgggacggcctatgggatgcctggggcccatggagtgaatgctcacgcacctgcgggggtggggcctcctactctctgaggcgctgcctgagcagcaagagctgtgaaggaagaaatatccgatacagaacatgcagtaatgtggactgcccaccagaagcaggtgatttccgagctcagcaatgctcagctcataatgatgtcaagcaccatggccagttttatgaatggcttcctgtgtctaatgaccctgacaacccatgttcactcaagtgccaagccaaaggaacaaccctggttgttgaactagcacctaaggtcttagatggtacgcgttgctatacagaatctttggatatgtgcatcagtggtttatgccaaattgttggctgcgatcaccagctgggaagcaccgtcaggaagataatgtggggtctgcaacggagatgggtccacctgccggctggtccgagggcagtataaatcccagctctccgcaaccaaatcggatgatactgtggttgcaattccctatggaagtagacatattcgccttgtcttaaaaggtcctgatcacttatatctggaaaccaaaaccctccaggggactaaaggtgaaaacagtctcagctccacaggaactttccttgtggacaattctagtgtggacttccagaaatttccagacaaagagatactgagaatggctggaccactcacagcagatttcattgtcaagattcgtaactcgggctccgctgacagtacagtccagttcatcttctatcaacccatcatccaccgatggagggagacggatttctttccttgctcagcaacctgtggaggaggttatcagctgacatcggctgagtgctacgatctgaggagcaaccgtgtggttgctgaccaatactgtcactattacccagagaacatcaaacccaaacccaagcttcaggagtgcaacttggatccttgtccagccaggtgggaggccaccccatggaccgcgtgctcctcctcgtgtggggggggcatccagagccgggcagtttcctgtgtggaggaggacatccaggggcatgtcacttcagtggaagagtggaaatgcatgtacacccctaagatgcccatcgcgcagccctgcaacatttttgactgccctaaatggctggcacaggagtggtctccgtgcacagtgacatgtggccagggcctcagataccgtgtggtcctctgcatcgaccatcgaggaatgcacacaggaggctgtagcccaaaaacaaagccccacataaaagaggaatgcatcgtacccactccctgctataaacccaaagagaaacttccagtcgaggccaagttgccatggttcaaacaagctcaagagctagaagaaggagctgctgtgtcagaggagccctcgttcatcccaaaggcctggtcggcctgcacagtcacctgtggtgtggggacccaggtgcgaatagtcaggtgccaggtgctcctgtctttctctcagtccgtggctgacctgcctattgacgagtgtgaagggcccaagccagcatcccagcgtgcctgttatgcaggcccatgcagcggggaaattcctgagttcaacccagacgagacagatgggctctttggtggcctgcaggatttcgacgagctgtatgactgggagtatgaggggttcaccaagtgctccgagtcctgtggaggaggtgtccaggaggctgtggtgagctgcttgaacaaacagactcgggagcctgctgaggagaacctgtgcgtgaccagccgccggcccccacagctcctgaagtcctgcaatttggatccctgcccagcaaggtgggaaattggcaagtggagtccatgtagtctcacatgtggggtcggcctacagaccagagacgtcttctgcagccacctgctttccagagagatgaatgaaacagtcatcctggctgatgagctgtgtcgccagcccaagcccagcacggtgcaagcttgtaaccgctttaattgccccccagcctggtaccctgcacagtggcagccgtgttccagaacgtgtggcgggggtgttcagaaacgtgaggttctttgcaagcagcgcatggctgatggcagcttcctggagcttcctgagaccttctgttcagcttcaaaacctgcctgccagcaagcatgcaagaaagatgactgtcccagcgagtggcttctctcagactggacagagtgttccacaagctgcggggaaggcacccagactcgaagcgccatttgccgaaagatgctgaaaaccggcctctcaacggttgtcaattccaccctgtgcccgcccctgcctttctcttcctccatcaggccctgtatgctggcaacctgtgcaaggcccgggcggccatccacgaagcacagcccgcacatcgcggccgccaggaaggtctacatacagactcgcaggcagaggaagctgcacttcgtggtggggggcttcgcctacctgctccccaagacggcggtggtgctgcgctgcccggcgcgcagggtccgcaagcccctcatcacctgggagaaggacggccagcacctcatcagctcgacgcacgtcacggtggcccccttcggctatctcaagatccaccgcctcaagccctcggatgcaggcgctacacctgctcagcgggcccggcccgggagcactttgtgattaagctcatcggaggcaaccgcaagctcgtggcccggcccttgagcccgagaagtgaggaagaggtgcttgcggggaggaagggcggcccgaaggaggccctgcagacccacaaacaccagaagggatcttctccaacggcagcaaggcggagaagcggggcctggccgccaacccggggagccgctacgacgacctcgtctcccggctgctggagcagggcggctggcccggagagctgctggcctcgtgggaggcgcaggactctgcggaaaggaacacgacctcggaggaggacccgggtgcagagcaagtgctcctgcacctgcccttcaccatggtgaccgagcagcggcgcctggacgacatcctggggaacctctcccagcagcccgaggagctgcgcgacctctacagcaagcacctggtggcccagctggcccaggagatcttccgcagccacctggagcaccaggacacgctcctgaagccctcggagcgcaggacttccccagtgactctctcgcctcataaacacgtgtctggcttcagcagctcctgcggacctcctccaccggggacgccgggggaggctctcgaaggccacaccgcaagcccaccatcctgcgcaagatctcagcggcccagcagctctcagcctcggaggtggtcacccacctggggcagacggtggccctggccagcgggacactgagtgttcttctgcactgtgaggccatcggccacccaaggcctaccatcagctgggccaggaatggagaagaagttcagttcagtgacaggattcttctacagccagatgattccttacagatcttggcaccagtggaagcagatgtgggtttctacacttgcaatgccaccaatgccttgggatacgactctgtctccattgccgtcacattagcaggaaagccactagtgaaaacgtcacgaatgacagtgatcaacacggagaagcctgcagtcacagtcgatataggaagcaccatcaaaacagtgcagggagtgaatgtgacaatcaactgccaggttgcaggagtgcctgaagctgaagtcacttggttcaggaataaaagcaaactgggctccccgcaccatctgcacgaaggctccttgctgctcacaaacgtgtcctcctcggatcagggcctgtactcctgcagggcggccaatcttcatggagagctgactgagagcacccagctgctgatcctagatcccccccaagtccccacacagttggaagacatcagggccttgctcgctgccactggaccgaaccttccttcagtgctgacgtctcctctgggaacacagctggtcctggatcctgggaattctgctctccttggctgccccatcaaaggtcaccctgtccctaatatcacctggtttcatggtggtcagccaattgtcactgccacaggactgacgcatcacatcttggcagctggacagatccttcaagttgcaaaccttagcggtgggtctcaaggggaattcagctgccttgctcagaatgaggcaggggtgctcatgcagaaggcatctttagtgatccaagattactggtggtctgtggacagactggcaacctgctcagcctcctgtggtaaccggggggttcagcagccccgcttgaggtgcctgctgaacagcacggaggtcaaccctgcccactgcgcagggaaggttcgccctgcggtgcagcccatcgcgtgcaaccggagagactgcccttctcggtggatggtgacctcctggtctgcctgtacccggagctgtgggggaggtgtccagacccgcagggtgacctgtcaaaagctgaaagcctctgggatctccacccctgtgtccaatgacatgtgcacccaggtcgccaagcggcctgtggacacccaggcctgtaaccagcagctgtgtgtggagtgggccttctccagctggggccagtgcaatgggccttgcatcgggcctcacctagctgtgcaacacagacaagtcttctgccagacacgggatggcatcaccttaccatcagagcagtgcagtgctcttccgaggcctgtgagcacccagaactgctggtcagaggcctgcagtgtacactggagagtcagcctgtggaccctgtgcacagctacctgtggcaactacggcttccagtcccggcgtgtggagtgtgtgcatgcccgcaccaacaaggcagtgcctgagcacctgtgctcctgggggccccggcctgccaactggcagcgctgcaacatcaccccatgtgaaaacatggagtgcagagacaccaccaggtactgcgagaaggtgaaacagctgaaactctgccaactcagccagtttaaatctcgctgctgtggaacttgtggcaaagcgtgaagatagggtgtggggaaaaactctaccctggccacacgaaggactcacgcaaccacctcggacagaacctaagctttcttcattttatttatttatttccccctccccactccacacacacccttccaacctcctccacctccaccttcaagcataaggacgtccgcgtgttttctctttcagttagctggaggacaggatgttgggaaaggaaaggacagatgtctaaaggaggttgcagagcaggccaggcagacagtgggggctcccttgaagagcttcctccctcccaaacctgggtctcaaagacctagaaagaggcaggcacagcccctgcggacagcagggagccagaaggtttgtagcctattggtgcaaacattggacaaattcctgtgtctttcctagaagcgcagtcgacgcggccgcg

SEQ ID NO: 2381 - DNA, 5720 bp, Homo sapiens
tcgacggcagaggagcacttagcagcttattcagtgtccgattctgattccggcaaggatccaagcatggaatgctgccgtcgggcaactcctggcacactgctcctctttctggctttcctgctcctgagttccaggaccgcacgctccgaggaggaccgggacggcctatgggatgcctggggcccatggagtgaatgctcacgcacctgcgggggtggggcctcctactctctgaggcgctgcctgagcagcaagagctgtgaaggaagaaatatccgatacagaacatgcagtaatgtggactgcccaccagaagcaggtgatttccgagctcagcaatgctcagctcataatgatgtcaagcaccatggccagttttatgaatggcttcctgtgtctaatgaccctgacaacccatgttcactcaagtgccaagccaaaggaacaaccctggttgttgaactagcacctaaggtcttagatggtacgcgttgctatacagaatctttggatatgtgcatcagtggtttatgccaaattgttggctgcgatcaccagctgggaagcaccgtcaaggaagataactgtggggtctgcaacggagatgggtccacctgccggctggtccgagggcagtataaatcccagctctccgcaaccaaatcggatgatactgtggttgcaattccctatggaagtagacatattcgccttgtcttaaaaggtcctgatcacttatatctggaaaccaaaaccctccaggggactaaaggtgaaaacagtctcagctccacaggaactttccttgtggacaattctagtgtggacttccagaaatttccagacaaagagatactgagaatggctggaccactcacagcagatttcattgtcaagattcgtaactcgggctccgctgacagtacagtccagttcatcttctatcaacccatcatccaccgatggagggagacggatttctttccttgctcagcaacctgtggaggaggttatcagctgacatcggctgagtgctacgatctgaggagcaaccgtgtggttgctgaccaatactgtcactattacccagagaacatcaaacccaaacccaagcttcaggagtgcaacttggatccttgtccagccaggtgggaggccaccccatggaccgcgtgctcctcctcgtgtggggggggcatccagagccgggcagtttcctgtgtggaggaggacatccaggggcatgtcacttcagtggaagagtggaaatgcatgtacacccctaagatgcccatcgcgcagccctgcaacatttttgactgccctaaatggctggcacaggagtggtctccgtgcacagtgacatgtggccagggcctcagataccgtgtggtcctctgcatcgaccatcgaggaatgcacacaggaggctgtagcccaaaaacaaagccccacataaaagaggaatgcatcgtacccactccctgctataaacccaaagagaaacttccagtcgaggccaagttgccatggttcaaacaagctcaagagctagaagaaggagctgctgtgtcagaggagccctcgttcatcccaaaggcctggtcggcctgcacagtcacctgtggtgtggggacccaggtgcgaatagtcaggtgccaggtgctcctgtctttctctcagtccgtggctgacctgcctattgacgagtgtgaagggcccaagccagcatcccagcgtgcctgttatgcaggcccatgcagcggggaaattcctgagttcaacccagacgagacagatgggctctttggtggcctgcaggatttcgacgagctgtatgactgggagtatgaggggttcaccaagtgctccgagtcctgtggaggaggtgtccaggaggctgtggtgagctgcttgaacaaacagactcgggagcctgctgaggagaacctgtgcgtgaccagccgccggcccccacagctcctgaagtcctgcaatttggatccctgcccagcaaggtgggaaattggcaagtggagtccatgtagtctcacatgtggggtcggcctacagaccagagacgtcttctgcagccacctgctttccagagagatgaatgaaacagtcatcctggctgatgagctgtgtcgccagcccaagcccagcacggtgcaagcttgtaaccgctttaattgccccccagcctggtaccctgcacagtggcagccgtgttccagaacgtgtggcgggggtgttcagaaacgtgaggttctttgcaagcagcgcatggctgatggcagcttcctggagcttcctgagaccttctgttcagcttcaaaacctgcctgccagcaagcatgcaagaaagatgactgtcccagcgagtggcttctctcagactggacagagtgttccacaagctgcggggaaggcacccagactcgaagcgccatttgccgaaagatgctgaaaaccggcctctcaacggttgtcaattccaccctgtgcccgcccctgcctttctcttcctccatcaggccctgtatgctggcaacctgtgcaaggcccgggcggccatccacgaagcacagcccgcacatcgcggccgccaggaaggtctacatacagactcgcaggcagaggaagctgcacttcgtggtggggggcttcgcctacctgctccccaagacggcggtggtgctgcgctgcccggcgcgcagggtccgcaagcccctcatcacctgggagaaggacggccagcacctcatcagctcgacgcacgtcacggtggcccccttcggctatctcaagatccaccgcctcaagccctcggatgcaggcgtctacacctgctcagcgggcccggcccgggagcactttgtgattaagctcatcggaggcaaccgcaagctcgtggcccggcccttgagcccgagaagtgaggaagaggtgcttgcggggaggaagggcggcccgaaggaggccctgcagacccacaaacaccagaacgggatcttctccaacggcagcaaggcggagaagcggggcctggccgccaacccggggagccgctacgacgacctcgtctcccggctgctggagcagggcggctggcccggagagctgctggcctcgtgggaggcgcaggactctgcggaaaggaacacgacctcggaggaggacccgggtgcagagcaagtgctcctgcacctgcccttcaccatggtgaccgagcagcggcgcctggacgacatcctggggaacctctcccagcagcccgaggagctgcgcgacctctacagcaagcacctggtggcccagctggcccaggagatcttccgcagccacctggagcaccaggacacgctcctgaagccctcggagcgcaggacttccccagtgactctctcgcctcataaacacgtgtctggcttcagcagctccctgcggacctcctccaccggggacgccgggggaggctctcgaaggccacaccgcaagcccaccatcctgcgcaagatctcagcggcccagcagctctcagcctcggaggtggtcacccacctggggcagacggtggccctggccagcgggacactgagtgttcttctgcactgtgaggccatcggccacccaaggcctaccatcagctgggccaggaatggagaagaagttcagttcagtgacaggattcttctacagccagatgattccttacagatcttggcaccagtggaagcagatgtgggtttctacacttgcaatgccaccaatgccttgggatacgactctgtctccattgccgtcacattagcaggaaagccactagtgaaaacgtcacgaatgacagtgatcaacacggagaagcctgcagtcacagtcgatataggaagcaccatcaaaacagtgcagggagtgaatgtgacaatcaactgccaggttgcaggagtgcctgaagctgaagtcacttggttcaggaataaaagcaaactgggctccccgcaccatctgcacgaaggctccttgctgctcacaaacgtgtcctcctcggatcagggcctgtactcctgcagggcggccaatcttcatggagagctgactgagagcacccagctgctgatcctagatcccccccaagtccccacacagttggaagacatcagggccttgctcgctgccactggaccgaaccttccttcagtgctgacgtctcctctgggaacacagctggtcctggatcctgggaattctgctctccttggctgccccatcaaaggtcaccctgtccctaatatcacctggtttcatggtggtcagccaattgtcactgccacaggactgacgcatcacatcttggcagctggacagatccttcaagttgcaaaccttagcggtgggtctcaaggggaattcagctgccttgctcagaatgaggcaggggtgctcatgcagaaggcatctttagtgatccaagattactggtggtctgtggacagactggcaacctgctcagcctcctgtggtaaccggggggttcagcagccccgcttgaggtgcctgctgaacagcacggaggtcaaccctgcccactgcgcagggaaggttcgccctgcggtgcagcccatcgcgtgcaaccggagagactgcccttctcggtggatggtgacctcctggtctgcctgtacccggagctgtgggggaggtgtccagacccgcagggtgacctgtcaaaagctgaaagcctctgggatctccacccctgtgtccaatgacatgtgcacccaggtcgccaagcggcctgtggacacccaggcctgtaaccagcagctgtgtgtggagtgggccttctccagctggggccagtgcaatgggccttgcatcgggcctcacctagctgtgcaacacagacaagtcttctgccagacacgggatggcatcaccttaccatcagagcagtgcagtgctcttccgaggcctgtgagcacccagaactgctggtcagaggcctgcagtgtacactggagagtcagcctgtggaccctgtgcacagctacctgtggcaactacggcttccagtcccggcgtgtggagtgtgtgcatgcccgcaccaacaaggcagtgcctgagcacctgtgctcctgggggccccggcctgccaactggcagcgctgcaacatcaccccatgtgaaaacatggagtgcagagacaccaccaggtactgcgagaaggtgaaacagctgaaactctgccaactcagccagtttaaatctcgctgctgtggaacttgtggcaaagcgtgaagatagggtgtggggaaaaactctaccctggccacacgaaggactcacgcaaccacctcggacagaacctaagctttcttcattttatttatttatttccccctccccactccacacacacccttccaacctcctccacctccaccttcaagcataaggacgtccgcgtgttttctctttcagttagctggaggacaggatgttgggaaaggaaaggacagatgtctaaaggaggttgcagagcaggccaggcagacagtgggggctcccttgaagagcttcctccctcccaaacctgggtctcaaagacctagaaagaggcaggcacagcccctgcggacagcagggagccagaaggtttgtagcctattggtgcaaacattggacaaattcctgtgtctttcctagaagcgcag

SEQ ID NO: 2382 - DNA, 751 bp, Homo sapiens
  misc_feature (636)..(636): n equals a,t,g, or c
  misc_feature (647)..(647): n equals a,t,g, or c
  misc_feature (660)..(660): n equals a,t,g, or c
  misc_feature (668)..(668): n equals a,t,g, or c
  misc_feature (711)..(711): n equals a,t,g, or c
caggtaccggtccggaattcgcggccgcgtcgacgcttggatgactgtgcgtgggtgggttgtgcttcagaagggacatgggatgaaacagttgtttgggtctgaacttcaggctgagtctgaacttcaggctgagctggggactggggctgggtttggggctggggctgagctgaaggctgagcagtctgtggctgggcttctgctggacccacacttgatgactgagctggtggcagggttttgtcttgatgtacctgcatctggggtgacagtttactctgcctttgttcacctgtacctgctgctgtcgtggaaacagtggtggtggtggtgctggctgtggtggctgttgttgccaatggggtaaagaggaatcgctgaacagtaccatttggcattgcagcttgcattagctgctggcctgggcctgggagtacagtcaccccttgaggtatcaactgcaactgtccagtagtttgaccttgtccttgaattactactgtcaaaccttgattgccaccgtggccctgtgttaactgagtaagttgagccatggtgagcttcacttgtccttgktgggggcgagggggttgtgaggctgaagactgtatatttgaaagtggacgttkctgnaagttaaagcnttttctgccccanggttgttntagggaaaaccggtgtttaaggggggccgggaaaaccttgccnagttggaagaacaaaggcctggcccccccccttggaatgg

SEQ ID NO: 2383 - DNA, 1847 bp, Homo sapiens
  misc_feature (4)..(4): n equals a,t,g, or c
  misc_feature (26)..(26): n equals a,t,g, or c
  misc_feature (82)..(82): n equals a,t,g, or c
  misc_feature (1350)..(1350): n equals a,t,g, or c
  misc_feature (1812)..(1812): n equals a,t,g, or c
  misc_feature (1824)..(1824): n equals a,t,g, or c
  misc_feature (1836)..(1836): n equals a,t,g, or c
  misc_feature (1847)..(1847): n equals a,t,g, or c
aacntagctgctggcctgggcctggnagtacagtcacccttgaaggtatcaactgcaactgtccagtagtttgaccttgtcnttgaattactactgtcaaaccttgattgccaccgtggccctgtgttaactgagtaagttgagccatggtgagcttcacttgtccttgttgggggcgagggggttgtgaggctgaagactgtatatttgaagtggacgttgctgaagttaagcttttctgcccaggtgttgaggaaaccgtgttaggggcggagactgcagtggagacaggctgccccctgatgatttgagtcatcacttgctgaggagcacctggctgtaccatcacaggtgttcgaataattgcctttcctagtgttgactgttggagtggtgttctaatcacggtcataccagggcgaatctgaggccctgtgattacttgtgaattgcttgtggttcctccagagcctgaggtattgggcctaattgtgactgttgctgtcctgggctggaatgaagtaaaggtttgctgactggtacctgtacttgatggaatgatacccaggactttctgctgtacttgaacaacgcctgartttgactggccttgcttaacccatgtagcaaaggtttgatgaaagttcttgytttgttggaatgttactgtagctggagatccaactttagtagttagtaccattttggttccagttgtractgagccacttatgggggccaccataaccttctgtgctggagagatggtgctggttgtactgcttgttggggaagtagkggaagttgcaatcactgtcggcttctgctgctccagtcgtttcttagcctgttgctcaactgcttgtgccttttctttctccactctctcagcaaatgccctgatctcccacaattccagttcttcttctgctacccaggtttcaataataacagggccagtttgcttgggcgtttctggtctctttggccgcagtgcacttgatcgaaggcctttcctctgaggtgtaggcgtttcttttggtgtttctggaactccaatgggacaaatgattttcctgatacaatattcagatcgaatgccataaggaccaacatctctcctcttaattatttctgttgktgtgatttcagtttcggatgtttctgtccgtgtagtccctcctcctggaggagccttggccgscatatcatcccatctcaaacttgcccacagtaaccgtaacatcaggctcactccagctaaggactttactgtctgaagtctatacctccaagtgatgccaaaggtcggtctaggagaaggatatggccatatatccaaagcaaggntttgcattgtaattaaaataagggacctctcggattcctcttttcgggccacttttttaagtcatcattaggcaaaacaaaaatgctcttcttgctgctcttggtaacaaattttctataggatggcagagctgtacctgaacgagtcttctttggtcttgaaaatttcatcagtttcactttgtctcgtgtggaatactctttgctcacagtcatagatgtaaccagtgtgcctcccgtggtggtcagggagtctgtcactgtcgtggtgaccacggttttgctctgctcctttacagagatgatgtccacactgccgcctgtggagggtgtggaaagcttggtcactgttgtagtggtggttgtgacagtggattttgcacaattttctgtggaagaaaccacagtttgcttatcgcctttttctaccttgatcacagtttttgattctgtggccactgnggaggtcatcgnggtgacttctgngatgacggctn

SEQ ID NO: 2384 - DNA, 1509 bp, Homo sapiens
  misc_feature (29)..(29): n equals a,t,g, or c
  misc_feature (31)..(31): n equals a,t,g, or c
  misc_feature (54)..(54): n equals a,t,g, or c
  misc_feature (76)..(76): n equals a,t,g, or c
  misc_feature (1505)..(1505): n equals a,t,g, or c
tgtaacggggccatttaagcccggccggntntgggtggttccgcccaagggtgnccggttacccttgccagggccntagcgcccgctcctttcgctttctttcccttcctttctcgccacgttcgcggctttccccgtcaagctttaatcgggggctccctttagggtccgatttagtgctttcggcacctggccccaaaaaccttgattagggtgatggttcacgtagtgggccatcgccctgatagcggtttttcgccctttgacgttggagtccacgttctttaatagtggactcttgttccaaactggaacaacactcaaccctatctcggtctattcttttgatttataagggattttgccgatttcggcctattggttaaaaaatgagctgatttamcaaaaatttamcgcgaattttaacaaaatattaacgcttacaatttgccattcgccattcaggctgcgcaactgttgggaagggcgatcggtgcgggcctcttcgctattacgccagctggcgaaagggggatgtgctgcaaggcgattaagttgggtaacgccagggttttcccagtcacgacgttgtaaaacgacggccagtgaattgtaatacgactcactatagggcgaattgggtaccgggccccccctcgagttttttttttttttttttgaatgtgtactagatgctatttattaaactgtagacaggagataaatactttatttcaaaagtgcaaagaagggaagacaaatcacatttctttttatcatgtaaacttgtaccaaagacttatgaatagatttatgaattggagtagaaaacatagacatttctaccttgaggatatagaagggaacttaggaagtgagaagtcagattaccctagtcctctagggtgcttaaagctaactagtcccgtgaatgagaatctaacctatgtgaaaatctccagcctgtacctgtacagcatcagccctgggacaacacagtcaggggcaggctgtagtcacatctcttagcctaagagtacacagctgtcagggaaagtcctgatggccacagtgaaaaaggtcatgggtggagagaagcaaagtaggaaggatcatttgaagcacaaacaaatggggaaactgaacagacaatctcagtatcaccacatctgcttcaaaaatagcacaccaactcccttccaaagtgcatcgttacactgcaccatcgtggaagaaatggaagagcaggatggatttggctggctggagtcacatcttggggaagctggccaggttggcaatgccacaggcgttgttcttatttcgagccatgaggatatatcctttgtttccccagttttctccccagctgtttttaattatccagctcgtgccgaattcctgcagcccgggggatccactagttctagagcggccgccaccgcggtggagctccagcttttgttccctttagtgagggttaatttcgagctggcgtacaatgngtct

SEQ ID NO: 2385 - DNA, 2094 bp, Homo sapiens
aattcggcacgagctttgctctggtaaatggagtggctgtctcagtaatggagagtcagtgagatacatacacatctactattctgcagccagattcaggaggaagagtgtccaccaagagatgacttcagtgatgcagaccagctcagagtggggaatgatggcattttcatgctggcatttttcatggcatttattttcaactggcttggattttgtttatccttctgtatcaccaataccatagctggaaggtatggtgctatctgcggatttggcctttccttgatcaaatggatccttattgtcaggttttctgattattttactggatatttcaatggacagtattggctttggtggatatttcttgtacttggcctgctccttttcttcagaggatttgttaattatctaaaagtcagaaacatgtctgaaagtatggcagctgctcatagaacaaggtatttcttcttattgtagagactgcatcaacccgacattcctttcttataccaatgtgaaatttccagatcatctgtaaacctacaactttaatagaagactactaataacagaagacaaattagtgaagaaaagacrgagtttcgaaattgaatggcagggtggtttttgcttacaagccatttctgttcattctttaagtatctatatttcatttgttttgcacatatgcatatgtgcccatttaagatatttgcatatacttgatagaaaccataaagttgtagcagttaagtccagtcacatttggttaatcagtgtttgatataattgaaagagttgagtggataaacagtcttccagcttgtaaatgccattgacttctgacctgacatttagtataataaaaatgaaattcttaaccatgtcaaatgatttagtttctggctcttagactcatctggcagttctacacatgaaacatcttttgttatataaggtgtattgaaacctgcagtgctgattattagaaaggatttgtcagatttttgaacatgatatttacattattatttaggaaaactcttcctgtaaataaccatgcataacttactttctgcaatgttttcttagaaattgtgtccagatagctttcactaattttaaattaagtgaactaaatatatatgtgtatatgtatacacatatatatacacacacacatatatatatttagaaacgtgagtgttaaagatagaatttgttttaggacaaattttaagaaaatgtgggaataccaaatgtcctttataagaaaaataaattttrttttaagggacatactagttttagggattttcagatgggaagctgcatttttaggattgcccatcttaagagatcttgcaggaagagattgtattagatattatatttatttcatttaagataattttcaaagttaattttctaaataagataattctcatttgtgtttgtcttttaaaaggccaataaaatatctttcagtatcattgtaataattttttagagtttaatttgtaaagcttagcaaataaaatcttgtactatgaatagcttcttgctttatgactttaggattaacttgtaaaaaacatatcctgaactgagatatgcaaaatactcattttcaagttatggaaatgtgtttgtggcatataggactgtggggtctgtgtgtgtagtgagagtgtgtagccactattataactggaatttaatttacattcataaactactatatttcccatcttgcaaatcattttatgtctcatctgtttttcctttcggttatatctttggttttgaataccaacatttaaaatgatggtattttatcttttaaacttaaaaattatttaatacagctatatggaccttataaaattgatttcttatttattattagacattactactaaaaggtacatctaactattcagggacatttttccatttccaaaaaataaaatttattatgctttataacctcttctgtattttctaattttttcattgtctttgataaataaaacagttttgttttgctaatataaaaaaaaaaaaaaaaaactcgagggggggccc

SEQ ID NO: 2386 - DNA, 2074 bp, Homo sapiens
ggcacgagctttgctctggtaaatggagtggctgtctcagtaatggagagtcagtgagatacatacacatctactattctgcagccagattcaggaggaagagtgtccaccaagagatgacttcagtgatgcagaccagctcagagtggggaatgatggcattttcatgctggcatttttcatggcatttattttcaactggcttggattttgtttatccttctgtatcaccaataccatagctggaaggtatggtgctatctgcggatttggcctttccttgatcaaatggatccttattgtcaggttttctgattattttactggatatttcaatggacagtattggctttggtggatatttcttgtacttggcctgctccttttcttcagaggatttgttaattatctaaaagtcagaaacatgtctgaaagtatggcagctgctcatagaacaaggtatttcttcttattgtagagactgcatcaacccgacattcctttcttataccaatgtgaaatttccagatcatctgtaaacctacaactttaatagaagactactaataacagaagacaaattagtgaagaaaagacggagtttcgaaattgaatggcagggtggtttttgcttacaagccatttctgttcattctttaagtatctatatttcatttgttttgcacatatgcatatgtgcccatttaagatatttgcatatacttgatagaaaccataaagttgtagcagttaagtccagtcacatttggttaatcagtgtttgatataattgaaagagttgagtggataaacagtcttccagcttgtaaatgccattgacttctgacctgacatttagtataataaaaatgaaattcttaaccatgtcaaatgatttagtttctggctcttagactcatctggcagttctacacatgaaacatcttttgttatataaggtgtattgaaacctgcagtgctgattattagaaaggatttgtcagatttttgaacatgatatttacattattatttaggaaaactcttcctgtaaataaccatgcataacttactttctgcaatgttttcttagaaattgtgtccagatagctttcactaattttaaattaagtgaactaaatatatatgtgtatatgtatacacatatatatacacacacacatatatatatttagaaacgtgagtgttaaagatagaatttgttttaggacaaattttaagaaaatgtgggaataccaaatgtcctttataagaaaaataaattttattttaagggacatactagttttagggattttcagatgggaagctgcatttttaggattgcccatcttaagagatcttgcaggaagagattgtattagatattatatttatttcatttaagataattttcaaagttaattttctaaataagataattctcatttgtgtttgtcttttaaaaggccaataaaatatctttcagtatcattgtaataattttttagagtttaatttgtaaagcttagcaaataaaatcttgtactatgaatagcttcttgctttatgactttaggattaacttgtaaaaaacatatcctgaactgagatatgcaaaatactcattttcaagttatggaaatgtgtttgtggcatataggactgtggggtctgtgtgtgtagtgagagtgtgtagccactattataactggaatttaatttacattcataaactactatatttcccatcttgcaaatcattttatgtctcatctgtttttcctttcggttatatctttggttttgaataccaacatttaaaatgatggtattttatcttttaaacttaaaaattatttaatacagctatatggaccttataaaattgatttcttatttattattagacattactactaaaaggtacatctaactattcagggacatttttccatttccaaaaaataaaatttattatgctttataacctcttctgtattttctaattttttcattgtctttgataaataaaacagttttgttttgctaatataaaaaaaaaaaaaaaaaa

SEQ ID NO: 2387 - DNA, 1101 bp, Homo sapiens; identical to SEQ ID NO: 1757
  misc_feature (1092)..(1092): n equals a,t,g, or c
  misc_feature (1099)..(1099): n equals a,t,g, or c

SEQ ID NO: 2388 - DNA, 1049 bp, Homo sapiens
ggcacgagccagatccgctgatctagtgcttctcgaaaaaaaccttcaggcggcccatggcatgccttggactttattgtgggaagaccctattatttaaaaatggctcaactgaaatatatggagaatgtggggtatgcccaagaggacagagaacgaatgcacagaaatattgtcagccttgcacagaatctcctgaactttatgattggctctatcttggatttatggcaatgcttcctctggttttacattggttcttcattgaatggtactcggggaaaaagagttccagcgcacttttccaacacatcactgcattatttgaatgcagcatggcagctattatcaccttacttgtgagtgatccagttggtgttctttatattcgttcatgtcgagtattgatgctttctgactggtacacgatgctttacaacccaagtccagattacgttaccacagtacactgtactcatgaagccgtctacccactatataccattgtatttatctattacgcattctgcttggtattaatgatgctgctccgacctcttctggtgaagaagattgcatgtgggttagggaaatctgatcgatttaaaagtatttatgctgcactttacttcttcccaattttaaccgtgcttcaggcagttggtggaggccttttatattacgccttcccatacattatattagtgttatctttggttactctggctgtgtacatgtctgcttctgaaatagagaactgctatgatcttctggtcagaaagaaaagacttattgttctcttcagccactggttacttcatgcctatggaataatctccatttccagagtggataaacttgagcaagatttgccccttttggctttggtacctacaccagcccttttttacttgttcactgcaaaatttaccgaaccttcaaggatactctcagaaggagccaatggacactgagtgtagacatgtgaaatgccaaaaacctgagaagtgctcctaataaaaaagtaaatcaaaaaaaaaaaaaaaaaa

SEQ ID NO: 2389 - DNA, 2165 bp, Homo sapiens
atccattccactctataataaaacaaaagattttgtaggcaactcggaatatagctcttttgaaagtactcgacacctttagataagaattaaaaccaacctatgtaactgacataatcttgatcttttaatttgtaaatattgacaattttctttctgcacattttaatcttagtttcccttttgatttttctgaaggtgccaaattccatttaacttttttacaagtctttgtaaaattttaaatgcataaagggggttggggcaggggaaccacgaagtagttaattttagaaaaggatttactatacttcactcttctttttttttccccacaagcttttgtagatgcattgtagtagtctagcttagaagcaaatgcaagttattttaatgtacaaactaaatgggtaagaggtaaaatcttcatttaaatatactatgttctggatgaaaagagcaggagtaacaattgatgagcaatattcagagtgaagtaaatctggaaatggtagactgtgttgggattggggggagggccatgggaggggtacatcgtcaacatagccgatcctgttacatttaagagtagcctcgtaggttgaatttcttctggtagcttcatggtaaatgcatccgaataagccatactggattgcagtgtttgtttctgtagggtgtttaaggacttgacttcctttctcccatgattcctctggactgcacacagcacccacaaccagccccatgcatgctgctgcctctgggcagtcgtagaatctcccacttcagtttctcgttgattgtactcacctttatggaatccaaatacatccaaaagggtaaggcagttttaaaaatgtgaaaacatttaaaaatgataatagcagggaattcttagattatagtaaatgccttttacttaactgtgcccagcaggctgggtgcgttaaaaagcccaagtattttgaaaaaactcgaacagatttgacaagggtagccagcttggagtctagcaacttgccaatgtgtttaccaatctgggggcttgtttttcttttcttctttcaaataaatggcagttaactggctttacagtaaacattgaagagaggaggatttgtttattgtcactgggaatctgaccactatactgtcctttttttgtattctgggtaaatgttttttggaaaagatttgtcttttctaagtggaagttaaatttgttatactgcccatcccctaaagccaacagagatttgtagatttaaagggatcacatttgaagacaatagtgtttaagaaagcaagcaagtcccttagcagtcaggtcataacagggcacatttctgaccgaaccctctcaaggcagaggaggagtttggtgggtttcatacaccctgcagattcctgttggctctaaccctcaattacctaatcttatgctttaacacataactgcattggatgtgagagtaacgtaccgtatggtcattgttctatatattaacattgaacactgctgcgattgctcaaggacattttatgttacggctttaaagcaaaggcatgattattagaaactatttaagcttttttctttgaaaaacaagctccttttacagaatataaacaacagtagtgcctgtggtttagcccaccaatcttgatgactaaaagtagctgatgcattgtgcatatgatgcttgagatggtttttgcaaaagcagaaatcgctgcaaggtaatcacaatagataaaagtggtattttaaacctttgaaataaatggatgtaactgtaccttggtacagcttttcacttgtttagtttttaaacgttagtataatctgaataaataaaatgttgccaaattcaatgtagaaagaatgtgacaacacaccttgggtagttctgcttgtgtttttgcatattgtaaaagcagtgtcacagctaaaaagaaagaaatcgtttctaacagtaaattattgtgctttagttgctagtttgtactgagagttgacctctccctgtgcagttttttgttctaaacttgtataaataacaattgtgtaatgtgtctccctcctacattgtaacaattgcttcagcctacgttataaataaagaaccactagattaaaaaaaaaaaaaaaaaaactcgag

SEQ ID NO: 2390 - DNA, 6095 bp, Homo sapiens
  misc_feature (5941)..(5941): n equals a,t,g, or c
  misc_feature (6003)..(6003): n equals a,t,g, or c
  misc_feature (6059)..(6059): n equals a,t,g, or c
  misc_feature (6092)..(6092): n equals a,t,g, or c
gtaagtttgtgaattgctgattgcaacttaattcagggaccagtcttcaatctatatttcattagaatgattgttcctggaatgatcatacatggactgtcttaagctagcaaaatgttcatactttacactgactaaatgggtcctaaatgatgacattggtctttagacattaacatgtgtatatttttatattagctcaagctaaggttcagaattgaagcttgatattgactagaatagctaaaagtcaaaatgaggtgaggacactggtcttggaaggtagagaaaaataaatgtcttaccaggtgttaatggtatccccagttcttagacttttgtcttctcaggcaattttcatctcaagatctgatgagaagggcatattacattggtatgcaggatgattattgcatattttgtgggacctctaatttccctggtcatctttcagaatattctgttctgccacccccagagagtaaacacttgagccgatttcttcttccccagctattctttcctgggggtaattatgctttgtctttagattagagaagcatcaagcaatagcaatggtgctgtgtccttcggcctaaattcaatagatctcatctcctagggcttccttttcacttggctcaaaggatccattgtattttggcacaaagagcctggccagggtcatgtagccatagctcttagggatgatacctcaagaaattagctgggacccatcactctgtgaaacttcacattttaagaactgagttgagggggttgttatgcacttctgtaacttgaggctaagcaaggggttaactcttgtgagagccaatagagtgtgtctgtattcgcagtccatggctcattttctttatagtaggcatatggatcttcccctctgactttgaatatcatttggtgtggcctgtgggttattttcattctttaccaccaaataaagcggcttattagctactcagttacttgctactcaaaggttaggtcttccctgttcctgcttggcagtgttaaagcttacagggttaacttatgatgattctcctggctcattttcatcagaggcatgatgactggaaagggatcacatgggtcgttggtggtgacacctcactgtttcctaggtttggatagagagatgtatacaagacctttcctgttaaattacgtgactacagagacttgccaggacaaaatttcctaagaaacagaaaaatgattaagtgagataagtacctgggtgacacagatattagcccgttggtaaaagacaacaaatattagcttaaaatctgcatatgtagaatcattttcattagatttagagcttgaagcaccttggctctcagctactttaaactcctccccatataaatcagggcaccaataaataagtttcagctttttaaaccctggtttgatgttaagcattataaagtacgaagtttgttaccacagtagagataatttagtagaaaaatgctttgaggcttcagtatttgtaagattttgcattagccagatgctaggttgttgaaggcatttcagtgttgataatagcctgagcagacttctttacaaatgggatctgtttctatatgtgtatatgcccacttaccattcagagagactggtctttctctttgtcttccttcacattgctgtgtcagttctacacctagtcttttcagcacttagcaaattcaaattttgatttttttgtcagcttagttcactttaaggcatattggcatggtgtgtgaaagtgatgttttgccccagtattgaggacttttagatccaaataatgactcattaaatataattatgttttaagtatactgaatttctgttagcttaaaatgttaattctcaggaatgattttctcacactttgtgttggctaataataaaagcactgttttattctcaaaactcctttttcaaaaattagggagagagcagtagtgatcatttatgtgagcccctttgaaatgatggtgtcagagtgcagagaaacaatggagttttgatgccaaaaaggtttttttgcagtaaaagtaaaaatttggaattagttggcatatagaggaacccttttgtactggaacgtatgaggctggattgtgaaaaggtaatctttcgattgctagacttggttaacttagggctgcaaatctttttcttctrtcaaggtcacttaatatggaatgtttttgtcagactgtcctttgttggaatactttagctgttcagctactttgactcctaggagagaatttagttaaggttcaaagtaattaactggctttgccagtggtgagtcccacaccattattcacttagtagtcatataaatgtttttatttaaacttctctctcttcaatgctgagaataaggctttaaattactgattcacctttaaaggaatgttgtgagaattgatgtaatttctgtttctgtttccatctaaacttctttataaaaagagggattagtttttttgttttggggtaagcacctaatttatccagtaaccaacaaccctaaccattggcatatatagtctttcactcagaaataaacaaaaactgtttggtatatctgtatcattgctaatcttgtgcactttactttttgggcagtaccatacatagtctgaggctattgacttaaaccaataactgtactttatgtaatgactcttaaatttggttacctgggttcacagcttgcttgaagagaaaggatgctagaataaagtaagcagctgaagagcgagcaaatcaagacaaaacacagtggtctcagatttttcgtagtgtgggaacagtggttttgctctataccactgaaaagcactataacataattgttgtccatgatactgaagcttttcccctcacttctaggttgtttacattcagagctctatcaataagaggaatacatattacagtgaattcgacaaccgcacaagttggcagtaggtatccccaacctaatttatcttggtaaattcaccctgtttcctagtgctgctggataaaagagtgtttactttttattgctcttagacagagtagtctagataagttttcaatttatcaacatagcctagacttctgtaagtggaatgttcattagtaactcatctttttgttgttataattggaaacagaaacgaggcttattgctattgcagaaatcccaaactggcaaaggccagtatatatggtattccataatataaccagcttttgaaatttatgtgtttggattagtgccttctggttaccagtattgactctgctagtttgcacctttccgttcttaacagaaaatttgtatttgttattcctcttaaattttgtcgtaactagtgaaggaagtaaaaaaaaaaaaaaaaacatgcattacattgacatactttatgtgcagcctttatttaggttcagtgaaaccaggtagttctgtatttgtgttgtagcctaaatgttgtttcttttatatccattaaaaacttaaagttacttatgttctgtgatcttaatttygttgtgtttccattgtaggttgataggkatatcgagaacaggtacgtgacaacagtttatawtccatgatagaaagctaaagtccatagaaagcacaaaatcgtgttcacacattagtgtacccacacatagaaagcacaagactaatagtattctctgtatcccacaagtgccagtcataaaggccaccaggtatttgtctcagagttgctatgagcactacagtattgataagcccaagacaatgcggtatctaaactggtcctaatggtaagggacccaaaggaataatctcaataagtttgtaccacattgatggagggagagatatawatgtcaagaatgccaaaattatatttgggggttactagctaaaatggggtttgagggctttttactgcaacttgaaactggagaaatagggacagatgtctaggtttttggtgggtggaacaggtgacatatttctgttttaagctgtagtgtgattggggttttttgtaaaaaatcttaaatcttttaggaaatattacctcttaacagtgcccccccaaacatgcagaaagtcatactttaacagggcaaatactacttgtctttgattttttttgtgtacgtttgtatgtgagagatgaagttacctttatttttttcctatacttgactgtgcttcattttaataaaggataatttgatctgagtgttctgagcatcagactaattctgaagcatatttgctagaggagctactttgcttttcacaatggggtggagaggattctttcacttgtcccattaaccctcttctagtctagatgagatgaaatctgttaatgtgtgtgtagaagaaaacgtatgttcttctactcagcattgcccttttccacctcctcacttcacctccgagtagcttgtttatcaagaatgaatgaatgtctttgtcttaaattttgcccatgtgttaaaagatgtaattctcagaatgggagagaaatgactacctttgttcctactcttttatataattatccttttagggaaagacttggtcaactctaatatatctagaaggaagactatatctggtgtagactaatatgagatgttttagaagagttaacctgaacactttgagggagagattattcttgccagcaaaaagctagccaggaatgagcctaccacattatttgagaatatcaaacctcaggcctggggggatgaggggaagaagattaccagaagtgcaggaaagagaagtttgaggaacacccttggcttagcaacatgtgataatgcaaagctgttataacctgttaatcctacgtactatgtgttctgtacctttacatgtttttaaatttaagatagtttgtaagaactgtacaaaaaaatgcttctggagatttctttggcagaaatgcctttcatctataatttcatggagaactgctttaattagcctaggtgaaaagtagtcctagcagtgtaaatatgtataattagagttttctaatttcactgtgagatctctaacttttgagtggcaaacagatcaagtcttttgctcatagacttttctgtggggttattaaaatgcaaaagctttattttttttaataatgccatactccattagtgtcagatgatggtatggaatttgttcccttgctttcccccactgttactgcttcagtttatagattgccagcagagttcagaaatagagcagggatttacccgttctttgcttggacatcccattttcttttgtccagacccatgttggcaatcatgtatgaactgtgttatacttctcagtgctttcttttttctttttgataagatggatatcaaaaatagttgctgtgcaaaagttagtagtcttcttcaagaagaaaaccaattctttttctaataatatcctgtgaaattgcttcattcattcatttatttttaagccaaatgtcagcagagtgctgctgcttttatctagtaattttgatatgtaagtattaatgcatttttaaaagatgtctacattgaaacatgttcttcccagtgtcctgcttatgatgctttgttcagattttttgtaagagaccagttagtacactgggggtgtatattgtgtacatgtgtcattttagttaggcattgtaggccaaatgtgattataaatgaagttgatgaacattaattttgttattagtgagttttttgaattgtaaatggatttccagtttaccttctgttgtctacagcttttttaattttaaggtttgactaattgtatccatctcattgtacagtgttttagttgcaagcagaaagtagaatttggtataaagcaggttanttctatatgaaaggagtacgttgaaatgtagattaagattgtaaacagcatctactgcatcnacatggacacgatttaaatgaacagagactgtcaggttgagggatgtaaaagaaanaacgcaagcgcgttcaacgccgaaaccgctggnggg

SEQ ID NO: 2391 - DNA, 770 bp, Homo sapiens
  misc_feature (719)..(719): n equals a,t,g, or c
  misc_feature (765)..(765): n equals a,t,g, or c
ccacgcgtccgaacaagaaaaaatgctaacacttatttatttgaatggcacatggagaccgggcatgtggctcacacttgtaatcccagcaccttggaaggcggaggcgggtggatcacctgaagtcaggagttcaagaccagcctggccaacatggtgaagtcccgtccctactaaaaatacaaaaattagccaggtgtggtggtgcgcacctgtaatcccagctactcaggaggctgaggcaggagaatcacttgaatccgggaggtggaggttgcagtgagaggagattgagccattgcactccagcctgggcaacagagtgagactccatctcgaaaaacaaacaaacaaacaaaaaacagaatggcacattgatgagcattcattgattgattctttagtttttttatgttctctaaagaatttttaagatttaaagaagcatgtgctatttatttgtaggaaatcctcagaaaaggtacaaataaaaaataaaaattatccataattaataccagagattataattgttaattattatggtgttttctttgctagtatttaagatcattattaagatcacatacacatttttgcttactatcattagcatttgatgatatgatttttttaatttttatacattgttttaatggctgcacgatatttcattgtgtacaaataaaataactactgttccgctttgaaaaaaaaangggggggcccggaacccaattcgragtattcccgttacctccccgntcccg

SEQ ID NO: 2392 - DNA, 1668 bp, Homo sapiens
gtttttttcctctgtgttctccacccgcctcccccagccccagttttcataagactgctgtgaagatgtttgatataaaggcttgggctgagtatgttgtggaatgggctgcaaaggacccctatggcttccttacaaccgttattttggcccttactccactgttcctagcaagtgctgtactgtcttggaaattggccaagatgattgaggccagggagaaggagcaaaagaagaagcaaaaacgccaagaaaacattgcaaaagctaaacgactaaaaaaggattgaaggactgaacaggctttgcaaccagaggaaaatcatttggaaaattacacagctttggaagaatccactaaagtttcttctttggatttcttgacagtatgatttagtaaatgaaatttgaccaaatggaagaatcatgttagttctgacctcaatactatagtaacttttaggcgtgggtgtagaagtttataggtttctattgacagttattgtaaattagcatttactgtggtacaaattctttataactgacttagtcatttgccgcttagcagtttatatactgaaatgaaaacatcttgtggggaaaagtgactttagattatgaactcaattcaaatgaactctatttaaaatggggtcctattttggacaaaggaaattaagaatgtaaaagtcagaacagtcttgaggtaaaaagtgtgctttggcttaaaagggatacagtatattaattacatcttttattattattgtttatttcttagaatcatttctggctttctcaaaacaaaataatattaatgagtacttctatttgctgcatttttcttattacagcctttgagacagctggtaattataagtcattttccattttttaaaacataattttataaagaattctcttatctcgactatgtagaataccacctactggacagaacaatttttgtactcacaaacactgccattttcttagagatggcttgagaggagtaacactatggtttaaagcttgcagtaaaaatgccaaacactgtagtaccttggaacccagtttattcttgtgctaagcagaactgtaaaatagttaaaatgtcttatcaagtaattcgccgattacaaagacaccatttgttttttatttcattctttgttttaactcatgtggtagtgatatttaatactttctgatcaaacaggttcaaagtaaaacgttaaatttcacatttcttttaaagaactcttaaagtgtaacagttacgccatacttcataagtggtaaagaaaggtataaaatttggaaacattttgttgggcatagtagtgattgggtgaaaaggataaattatatcaaaatgagaatgtgctgtaattggaagtagggagctaaaggatgtttctttcagtttagtagaactggaacgttttactattaaacatggcttttataaatgcatggtccaataattttattcactgttagtatttaattcactgtcagcttattaatgttttctgtacccattaatgaattttaaattacaaaaaattgtctagcagctacagtttaaaaatgaaactagacattaaaataaatttgataattttttataaaaaaaaaaaaaaaaaaaaaaaaaaaaaaaaaaaa

SEQ ID NO: 2393 - DNA, 1217 bp, Homo sapiens
  misc_feature (11)..(11): n equals a,t,g, or c
  misc_feature (96)..(96): n equals a,t,g, or c
  misc_feature (106)..(106): n equals a,t,g, or c
  misc_feature (1187)..(1187): n equals a,t,g, or c
  misc_feature (1196)..(1196): n equals a,t,g, or c
ttataagggcnaaattgggtaacgggcccccccttcgaagttcccaagacccacacagcaatggcgcagccggaaactgggcccttagacttactncacgcccggntggcggctcgggttccctgtgggcgggacgcaaaggccgcgacttcccgccttccagctttccggtctggcggtgagtggggagtgggatccgatcccgtggggctatgtaggggaagttggtggctgcagctgccgtggttttctcctggtgtccagcagaaacggcggcggcgcaaggtgtggctgggccaacccaggatctcccaggaccctccgctctgcgcgacaaggggcccgcgcttgccaaggccgacgggcaggagtgaacgtggcctccgtgggtctgcagccccgataggccaattgtacagaatttaaaccgtctctcagatgtgtacagtagaactcaagaagacagactaccaagggtcatctgaagtcgtgattgggtcactaataacaccaggacaaagttaagggatcactactcaagcataagccccagttttcataagactgctgtgaagatgtttgatataaaggcttgggctgagtatgttgtggaatgggctgcaaaggacccctatggcttccttacaaccgttattttggcccttactccactgttcctagcaagtgctgtactgtcttggaaattggccaagatgattgaggccagggagaaggagcaaaagaagaagcaaaaacgccaagaaaacattgcaaaagctaaacgactaaaaaaggattgaaggactgaacaggctttgcaaccagaggaaaatcatttggaaaattacacagctttggaagaatccactaaagkttcttctttggatttcttgacagtatgatttagtaaatgaaatttgaccaaatggaagaatcatgttagytctgacctcaatactatagtaacttttaggcgtgggtgtagaagtttataggtttctattgacagttattgkaaattagcatttactggggtacaaattctttataactgacttagtcatttgccgcttagcagtttatatactgaaatgaaaacatcttgtggggaaaaagtgactytagattatgaactcaattcaaatgaactctatttaaaatggggtcctattttggacaaaggaaantaagaatgnaaaaagtcagaacagtcttga

SEQ ID NO: 2394 - DNA, 930 bp, Homo sapiens
ggcacgagcatgttgggcatcactgtcctcgctgcgctcttggcctgtgcctccagctgtggggtgcccagcttcccgcccaacctatccgcccgagtggtgggaggagaggatgcccggccccacagctggccctggcagatctccctccagtacctcaagaacgacacgtggaggcatacgtgtggcgggactttgattgctaacaacttcgtcctcactgccgcccactgcatcagcaacacccggacctaccgtgtgtccgtgggaaagaacaacctggaggtggaagacgaagaaggatccctgtttgtgggtgtggacaccatccacgtccacaagagatggaatgccctcctgttgcgcaatgatattgccctcatcaagcttgcagagcatgtggagctgagtgacaccatccaggtggcctgcctgccagagaaggactccctgctccccaaggactacccctgctatgtcaccggctggggccgcctctggaccaacggccccattgctgataagctgcagcagggcctgcagcccgtggtggatcacgccacgtgctccaggattgactggtggggcttcagggtgaagaaaaccatggtgtgcgctgggggcgatggcgtcatctcagcctgcaatggggactccggtggcccactgaactgccagttggagaacggttcctgggaggtgtttggcatcgtcagctttggctcccggcggggctgcaacacccgcaagaagccggtagtctacacccgggtgtccgcctacatcgactggatcaacgagaaaatgcagctgtgatttgttgctgggagcggcggcagcgagtccctgcaacagcaataaacttccttctcctcgggccacctggatccttgaaaaaaaaaaaaaaaaaaaaaaaaaaaaaaaaaaaaa

SEQ ID NO: 2395 - DNA, 2044 bp, Homo sapiens
gtcatgcagtgcgccggagaactgtgctctttgaggccgacgctaggggcccggaagggaaactgcgaggcgaaggtgaccggggaccgagcatttcagatctgctcggtagacctggtgcaccaccaccatgttggctgcaaggctggtgtgtctccggacactaccttctagggttttccacccagctttcaccaaggcctcccctgttgtgaagaattccatcacgaagaatcaatggctgttaacacctagcagggaatatgccaccaaaacaagaattgggatccggcgtgggagaactggccaagaactcaaagaggcagcattggaaccatcgatggaaaaaatatttaaaattgatcagatgggaagatggtttgttgctggaggggctgctgttggtcttggagcattgtgctactatggcttgggactgtctaatgagattggagctattgaaaaggctgtaatttggcctcagtatgtcaaggatagaattcattccacctatatgtacttagcagggagtattggtttaacagctttgtctgccatagcaatcagcagaacgcctgttctcatgaacttcatgatgagaggctcttgggtgacaattggtgtgacctttgcagccatggttggagctggaatgctggtacgatcaataccatatgaccagagcccaggcccaaagcatcttgcttggttgctacattctggtgtgatgggtgcagtggtggctcctctgacaatattagggggtcctcttctcatcagagctgcatggtacacagctggcattgtgggaggcctctccactgtggccatgtgtgcgcccagtgaaaagtttctgaacatgggtgcacccctgggagtgggcctgggtctcgtctttgtgtcctcattgggatctatgtttcttccacctaccaccgtggctggtgccactctttactcagtggcaatgtacggtggattagttcttttcagcatgttccttctgtatgatacccagaaagtaatcaagcgtgcagaagtatcaccaatgtatggagttcaaaaatatgatcccattaactcgatgctgagtatctacatggatacattaaatatatttatgcgagttgcaactatgctggcaactggaggcaacagaaagaaatgaagtgactcagcttctggcttctctgctacatcaaatatcttgtttaatggggcagatatgcattaaatagtttgtacaagcagctttcgttgaagtttagaagataagaaacatgtcatcatatttaaatgttccggtaatgtgatgcctcaggtctgcctttttttctggagaataaatgcagtaatcctctcccaaataagcacacacattttcaattctcatgtttgagtgattttaaaatgttttggtgaatgtgaaaactaaagtttgtgtcatgagaatgtaagtcttttttctactttaaaatttagtaggttcactgagtaactaaaatttagcaaacctgtgtttgcatatttttttggagtgcagaatattgtaattaatgtcataagtgatttggagctttggtaaagggaccagagagaaggagtcacctgcagtcttttgtttttttaaatacttagaacttagcacttgtgttattgattagtgaggagccagtaagaaacatctgggtatttggaaacaagtggtcattgttacattcatctgctgaacttaacaaaactgttcatcctgaaacaggcacaggtgatgcattctcctgctgttgcttctcagtgctctctttccaatatagatgtggtcatgtttgacttgtacagaatgttaatcatacagagaatccttgatggaattatatatgtgtgttttacttttgaatgttacaaaaggaaataactttaaaactattctcaagagaaaatattcaaagcatgaaatatgttgctttttccagaatacaaacagtatactcatgaaaaaaaaaaaaaagggcggccgctctagaggatccctcgaggggcccaa

SEQ ID NO: 2396 - DNA, 1382 bp, Homo sapiens
gaattcggcacgagggaaaactctattttgaaaatgaatatattttgatttaaacaatacagagaagtcaaaatggacacaatcttcttgtggagtcttctattgctgttttttggaagtcaagcctcaagatgctcagctcaaaaaaataccgaatttgcagtggatctttatcaagaggtttccttatctcataaggacaacattatattttcaccccttggaataactttggttcttgagatggtacaactgggagccaaaggaaaagcacagcagcagataagacaaactttaaaacaacaggaaacctcagctggggaagaattttttgtactgaagtcatttttctctgccatctcagagaaaaaacaagaatttacatttaatcttgccaatgccctctaccttcaagaaggattcactgtgaaagaacagtatctccatggcaacaaggaattttttcagagtgctataaaactggtggattttcaagatgcaaaggcttgtgcagrgatgataagtacctgggtagaaagaaaaacagatggaaaaattaaagacatgttttcaggggaagaatttggccctctgactcggcttgtcctggtgaatgctatttatttcaaaggagattggaaacagaaattcagaaaagaggacacacagctgataaattttactaagaaaaatggttcaactgtcaaaattccaatgatgaaggctcttctgagaacaaaatatggttatttttctgaatcttccctgaactaccaagttttagaattgtcttacaaaggtgatgaatttagcttaattatcatacttcctgcagaaggtatggatatagaagaagtggaaaaactaattactgctcaacaaatcctaaaatggctctctgagatgcaagaagaggaagtagaaataagcctccctagatttaaagtagaacaaaaagtagacttcaaagacgttttgtattctttgaacataaccgagatatttagtggtggctgcgacctttctggaataacagattcwtctgaagtgtatgtttcccaagtgacgcaaaaagttttctttgagataaatgaagatggtagtgaagctgcaacatcaactggcatacacatccctgtgatcatgagtctggctcaaagccaatttatagcaaatcatccatttctgtttattatgaagcataatccaacagaatcaattctgtttatgggaagagtgacaaatcctgacacccaggagataaaaggaagagatttagattcactgtgaatgaaaagcacagcctcagaataaaagatgatttctcaaaaataaaaaaaaaaaaaaaaaaaaaaaaaaaaaaaaaaaaaaaaaaactcgta

SEQ ID NO: 2397 - DNA, 1100 bp, Homo sapiens
ggcacagaccggacttccggctggtctgtggggtttcgggttcggggtttcctggtgggcgtcaggggcaggcaacagagtggcggccgctacggccctggaacggggccatggagaagctgcggcgagtcctgagcggccaggacgacgaggagcagggcctgactgcgcaggtcctggatgcctcatcccttagtttcaacaccagattgaaatggtttgccatctgcttcgtatgtggcgttttcttttctattcttggaactggattgctgtggcttccgggcggcataaagctttttgcagtgttttataccctcggcaatcttgctgcgttagccagtacatgctttttaatgggacctgtgaagcaactgaagaaaatgtttgaagcaacaagattgcttgcaacaattgttatgcttttgtgtttcatatttaccctgtgtgctgctctttggtggcataagaagggactggctgtgttattctgcatattgcagttcttgtcaatgacctggtatagcctgtcgtacatcccatatgcaagggatgcagttattaaatgctgttcttctctcctaagttgaaaatcagaaacttgtggaaaagagcacttgaatgttggtactctatgtttggtgaagtttgcttttccccataaaacactccaggaacaactgacgtgacagttgaagaccgttttgtactaagtctcattttgtatactggtaaaaactacatgcttgattaaaccattaaatgcttgtaactttaaattcattatgtgtcattaatatacttttccaaagataagatttttaatcactgccagttgtaaattatttttagccaatttttaaatcttttcaaagcagctttgaaatgtgaatatttaaaggtagacctgtgctgcaagataattaaacttttttgcttttaaaaaatgtctgcatttttaagattttttttactttaaatgtgaaacttattttaagctaaaaattgcttattatatgtaataaaaataatatataaatctttacaattttgaaataaacccatccttggaaaaawaaaaaaaaaaaaaaaaactcgag

SEQ ID NO: 2398 - DNA, 1070 bp, Homo sapiens
ggcacgaggtttcgggttcggggtttcctggtgggcgtcaggggcaggcaacagagtggcggccgctacggccctggaacggggccatggagaagctgcggcgagtcctgagcggccaggacgacgaggagcagggcctgactgcgcaggtcctggatgcctcatcccttagtttcaacaccagattgaaatggtttgccatctgcttcgtatgtggcgttttcttttctattcttggaactggattgctgtggcttccgggcggcataaacctttttgcagtgttttataccctcggcaatcttgctgcgttagccagtacatgctttttaatgggacctgtgaagcaactgaagaaaatgtttgaagcaacaagattgcttgcaacaattgttatgcttttgtgtttcatatttaccctgtgtgctgctctttggtggcataagaagggactggctgtgttattctgcatattgcagttcttgtcaatgacctggtatagcctgtcgtacatcccatatgcaagggatgcagttattaaatgctgttcttctctcctaagttgaaaatcagaaacttgtggaaaagagcacttgaatgttggtactctatgtttggtgaagtttgcttttccccataaaacactccaggaacaactgacgtgacagttgaagaccgttttgtactaagtctcattttgtatactggtaaaaactacatgcttgattaaaccattaaatgcttgtaactttaaattcattatgtgtcattaatatacttttccaaagataagatttttaatcactgccagttgtaaattatttttagccaatttttaaatcttttcaaagcagctttgaaatgtgaatatttaaaggtagacctgtgctgcaagataattaaacttttttgcttttaaaaaatgtctgcatttttaagattttttttactttaaatgtgaaacttattttaagctaaaaattgcttattatatgtaataaaaataatatataaatctttacaattttgaaataaacccatccttggaaaaaaaaaaaaaaaaaaaaaaa

SEQ ID NO: 2399 - DNA, 1275 bp, Homo sapiens
ttttttttttttttttttaagtgagtcttttttatgaaacaaggaaatctactaagacttattttgacactggagtgtcatgcccccatcctcaatctaacatgctactgcgttgttagagggtaaaaaggccgtcttcgtcttcccttccatgctgcacgtcattgaggacatttttactatctccaatgtagtctagccttgtgtgtttctgcgaacaataggtttccatgagtttccctctcaggagaaacgccacaaacaatgcgaagagcacaaatcccaaggagggggcgatgatcatcagtagttgggagatgggcatttcattcttcattgacatgggtattccatccatctgtcctgtttttgttgttttgttctgctcaggaactgctgtatcagatgctccaggctgaggagaagacacagaatcactcgttttccacattgacacgtgggatgttgatgggagatcccaaactttggactctttggatgtcagcaggacagtgtcagcagaagtagactcagcactactccaggaatcactggggaggacagtttctgattctgcagtgaggatgggcccttccttagaaggctcgggagtcagaagacctgtggcttcctccggaagggtgcttggggttagtgaaaggcacgtgtttgctgttgtgaagacggcaatggttgtcatctggagtggtgttccggttgtgagatcgggtgtggtcacgactgttgttggaagtgcagctggggttgttgtcatttgtcgggtggtggtggggcttgttgttgttgttctgcgtgtggtggtggttgctgttctgtgcgtggttgttgaggctctctgtagattcaggcgcacgtttatctttacatcgttgaaccagccaggcacttctatgcggcagcagtacacaccgctgtcactttcactggggtttaagatggtcaaggagacatcacctctcgggatagtcccctgaagtctatattttgctgactttcttgaggtcaccctcattccatcagtgcggatgagcgcctccttgcaaccggagtaggggcactggtctttcccccagcacatgctgttgctgttgtgagaccaggatgagtacagacagggcaaagtcacccggtgacccaaaacctccgtcacaacagtctctgaagtgactggtgtcaggtaaagccaccaaaactcaatcatcagccagagaatgagaggttctttggacattttgacggttgaccggacccagc

SEQ ID NO: 2400 - DNA, 1272 bp, Homo sapiens
ttttttttttttttttttaagtgagtcttttttatgaaacaaggaaatctactaagacttattttgacactggagtgtcatgcccccatcctcaatctaacatgctactgcgttgttagagggtaaaaaggccgtcttcgtcttcccttccatgctgcacgtcattgaggacatttttactatctccaatgtagtctagccttgtgtgtttctgcgaacaataggtttccatgagtttccctctcaggagaaacgccacaaacaatgcgaagagcacaaatcccaaggagggggcgatgatcatcagtagttgggagatgggcatttcattcttcattgacatgggtattccatccatctgtcctgtttttgttgttttgttctgctcaggaactgctgtatcagatgctccaggctgaggagaagacacagaatcactcgttttccacattgacacgtgggatgttgatgggagatcccaaactttggactctttggatgtcagcaggacagtgtcagcagaagtagactcagcactactccaggaatcactggggaggacagtttctgattctgcagtgaggatgggcccttccttagaaggctcgggagtcagaagacctgtggcttcctccggaagggtgcttggggttagtgaaaggcacgtgtttgctgttgtgaagacggcaatggttgtcatctggagtggtgttccggttgtgagatcgggtgtggtcacgactgttgttggaagtgcagctggggttgttgtcatttgtcgggtggtggtggggcttgttgttgttgttctgcgtgtggtggtggttgctgttctgtgcgtggttgttgaggctctctgtagattcaggcgcacgtttatctttacatcgttgaaccagccaggcacttctatgcggcagcagtacacaccgctgtcactttcactggggtttaagatggtcaaggagacatcacctctcgggatagtcccctgaagtctatattttgctgactttcttgaggtcaccctcattccatcagtgcggatgagcgcctccttgcaaccggagtaggggcactggtctttcccccagcacatgctgttgctgttgtgagaccaggatgagtacagacagggcaaagtcacccggtgacccaaaacctccgtcacaacagtctctgaagtgactggtgtcaggtaaagccaccaaaactcaatcatcagccagagaatgagaggttctttggacattttgacggttgactcgtgcc

SEQ ID NO: 2401 - DNA, 1120 bp, Homo sapiens; identical to SEQ ID NO: 1841
  misc_feature (1080)..(1081): n equals a,t,g, or c
  misc_feature (1087)..(1087): n equals a,t,g, or c
  misc_feature (1120)..(1120): n equals a,t,g, or c

SEQ ID NO: 2402 - DNA, 693 bp, Homo sapiens
  misc_feature (629)..(629): n equals a,t,g, or c
  misc_feature (635)..(635): n equals a,t,g, or c
  misc_feature (637)..(637): n equals a,t,g, or c
  misc_feature (672)..(672): n equals a,t,g, or c
  misc_feature (685)..(685): n equals a,t,g, or c
aattcggcacgagccctcctcggcctcccagagtgctgggattacaggcgtgagccactgtgcccggccccaggtcaattttgattgatttttcccatctctccatatgggtcataatgtcctgcctcttttcatgcctgtttttttgttttttgtttttcccggatattcaatattttgtattctaccttgtttggtgctggatatttttgtaaacctatacatatctttgcatttgtttctcgaatgtgatcaagttacttggaaaaaaaaaaaaaaaaaaaactcgagggggggcccggtacccaattcgccctatagtgagtcgtattacaattcactggccgtcgttttacaacgtcgtgactgggaaaaccctgcgttacccaacttaatcgccttgcagcacatccccctttcgccagctggcgtaatagcgaagaggcccgaccgatcgcccttccaacagttgcgcagcctgaatggcgaatggcaaattgtaagcgttaatattttggtaaaattcgcgttaaatttttggtaaatcagctcattttttaaccaataggcccgaaatcggcaaaaatccctttataaaatcaaaagaatagaccgagatagggttgaantgttgntncaattttggaacaagagtccactattaaagaacgngggacttcaacgncaaagggc

SEQ ID NO: 2403 - DNA, 1179 bp, Homo sapiens; identical to SEQ ID NO: 1701

SEQ ID NO: 2404 - DNA, 1702 bp, Homo sapiens; identical to SEQ ID NO: 357

SEQ ID NO: 2405 - DNA, 1915 bp, Homo sapiens
gtgtgagaggcctctctggaagttgtcccgggtgttcgccgctggagcccgggtcgagaggacgaggtgccgctgcctggagaatcctccgctgccgtcggctcccggagcccagccctttcctaacccaacccaacctagcccagtcccagccgccagcgcctgtccctgtcacggaccccagcgttaccatgcatcctgccgtcttcctatccttacccgacctcagatgctcccttctgctcctggtaacttgggtttttactcctgtaacaactgaaataacaagtcttgatacagagaatatagatgaaattttaaacaatgctgatgttgctttagtaaatttttatgctgactggtgtcgtttcagtcagatgttgcatccaatttttgaggaagcttccgatgtcattaaggaagaatttccaaatgaaaatcaagtagtgtttgccagagttgattgtgatcagcactctgacatagcccagagatacaggataagcaaatacccaaccctcaaattgtttcgtaatgggatgatgatgaagagagaatacaggggtcagcgatcagtgaaagcattggcagattacatcaggcaacaaaaaagtgaccccattcaagaaattcgggacttagcagaaatcaccactcttgatcgcagcaaaagaaatatcattggatattttgagcaaaaggactcggacaactatagagtttttgaacgagtagcgaatattttgcatgatgactgtgcctttctttctgcatttggggatgtttcaaaaccggaaagatatagtggcgacaacataatctacaaaccaccagggcattctgctccggatatggtgtacttgggagctatgacaaattttgatgtgacttacaattggattcaagataaatgtgttcctcttgtccgagaaataacatttgaaaatggagaggaattgacagaagaaggactgccttttctcatactctttcacatgaaagaagatacagaaagtttagaaatattccagaatgaagtagctcggcaattaataagtgaaaaaggtacaataaactttttacatgccgattgtgacaaatttagacatcctcttctgcacatacagaaaactccagcagattgtcctgtaatcgctattgacagctttaggcatatgtatgtgtttggagacttcaaagatgtattaattcctggaaaactcaagcaattcgtatttgacttacattctggaaaactgcacagagaattccatcatggacctgacccaactgatacagccccaggagagcaagcccaagatgtagcaagcagtccacctgagagctccttccagaaactagcacccagtgaatataggtatactctattgagggatcgagatgagctttaaaaacttgaaaaacagtttgtaagcctttcaacagcagcatcaacctacgtggtggaaatagtaaacctatattttcataattctatgtgtatttttattttgaataaacagaaagaaattttgggtttttaatttttttctccccgactcaaaatgcattgtcatttaatatagtagcctcttaaaaaaaaaaaaaacctgctaggatttaaaaataaaaatcagaggcctatctccactttaaatctgtcctgtaaaagttttataaatcaaatgaaaggtgacattgccagaaacttaccattaacttgcactactagggtagggaggacttagggatgtttcctgtgtcgtatgtgcttttctttctttcatatgatcaattctgttggtattttcagtatctcatttctcaaagctaaagagatatacattctggatacttgggaggggaataaattaaagttttcacactgaaaaaaaaaaaaaaaaaaaaactcgta

SEQ ID NO: 2406 - DNA, 3660 bp, Homo sapiens
  misc_feature (3651)..(3653): n equals a,t,g, or c
attgcttttgctgcttttctggctttccctttcggacatgcgcgctcggagcaaggcgccctcgcactcagcttaccgcgcatgtacgttgccaggggtaacgcaggtagccaaagtggcttgtggagtggcgaccgttagtgaggcggttgctgagacagacgctgaggcgggtaggaggagcccgagccgtaagggaagccgtgatgagggccgtgttgacgtggagagataaagccgagcactgtataaatgacatcgcatttaagcctgatggaactcaactgattttggctgccggaagcagattactggtttatgacacctctgatggcaccttacttcagcccctcaagggacacaaagacactgtgtactgtgtggcatatgcgaaggatggcaagcgctttgcttctggatcagctgacaaaagcgttattatctggacatcaaaactggaaggcattctgaagtacacgcacaatgatgctatacaatgtgtctcctacaatcctattactcatcaactggcatcttgttcctccagtgactttgggttgtggtctcctgaacagaagtctgtctccaaacacaaatcaagcagcaagatcatctgctgcagctggacaaatgatggtcagtacctggcgctkgggatgttcaatgggatcatcagcatacggaacaaaaatggcgaggagaaagtaaagatcgarcggccggggggctycctctygccaatatggkccatctgctggaacccttyaagagaggaacgtaatgacatcctggctgtggctgactggggacagaaagkttccttytaccagcttattttcagcacagtccatgggctttacaaggaccgctatgcctacagggatagcatgactgacgtcattgtgcagcacctgatcactgagcagaaagttcggattaaatgcaaagagcttgtcaagaagattgccatctacagaaatcgattggctatccaactgccagagaaaatcctcatctatgagttgtattcagaggacttatcagacatgcattaccgggtaaaggagaagattatcaagaagtttgagtgcaacctcctggtggtgtgtgccaatcacatcatcctgtgccaggagaaacggctgcagtgcctgtccttcagcggagtgaaggagcgggagtgkcagatggagtctctcattcgttacatcaaggtgatcggtggccctcctggaagagaaggcctcttagtggggctgaagaatggacagatcctgaagatcttcgtggacaatctctttgctatcgtcctgctgaagcaggccacagctgtgcgctgcttggacatgagtgcctcccgtaagaagctggccgtggtagatgaaaatgacacttgcctggtgtatgacatcgacaccaaggagctgctttttcaggaaccaaacgccaacagtgtagcttggaacacccagtgtgaggacatgctctgcttctcgggaggaggctacctcaacatcaaagccagcaccttccctgtgcaccggcagaagctgcagggctttgtggtcggctacaatggctccaagatcttctgcctccatgtcttctccatttctgccgtggaggtgccgcagtccgctcccatgtaccagtacctggataggaaactgttcaaggaagcctaccagattgcttgcttgggtgtcacagacactgattggcgtgaactggccatggaagcgctagaaggtttagattttgaaacagcaaagaaggccttcatcagagtacaagacctccgatatttagagctcatcagcagcattgaggagaggaagaagcggggagagaccaacaatgacctgtttctggcagatgtgttttcctaccaggggaagttccatgaggccgccaaactgtacaagaggagtgggcacgagaacctcgcgcttgaaatgtacaccgacctctgcatgtttgagtatgccaaggatttccttggatctggagaccccaaagaaacaaagatgctaatcaccaaacaggctgactgggccagaaatatcaaggagcccaaagccgccgtggagatgtacatctcagcaggagagcacgtcaaggccatcgagatctgtggtgaccatggctgggttgacatgttgatcgacatcgcccgcaaactggacaaggctgagcgcgagcccctgctgctgtgcgctacctacctcaagaagctggacagccctggctatgctgctgagacctacctgaagatgggtgacctcaagtccctggtgcagctgcacgtggagacccagcgctgggatgaggcctttgctttgggtgagaagcatcctgagtttaaggatgacatctacatgccgtatgctcagtggctagcagagaacgatcgctttgaggaagcccagaaagcgttccacaaggctgggcgacagagagaagcggtccaggtgctggagcagctcacaaacaatgccgtggcggagagcaggtttaatgatgctgcctattattactggatgctgtccatgcagtgcctcgatatagctcagcagatcctgcccagaaggacacaatgcttggcaagttctaccacttccagcgtttggcagagctgtaccatggttaccatgccatccatcgccacacggaagatccgttcagtgtccatcgtcctgaaactcttttcaacatctccaggttcctgctgcacagcctgcccaaggacaccccctcgggcatctctaaagtgaaaatactcttcaccttggccaagcagagcaaggccctcggtgcctacaggctggcccggcacgcctatgacaagctgcgtggcctgtacatccctgccagattccaaaagtccattgagctgggtaccctgaccatccgcgccaagcccttccacgacagtgaggagttggtgcccttgtgctaccgctgctccaccaacaacccgctgctcaacaacctgggcaacgtctgcatcaactgccgccagcccttcatcttctccgcctcttcctacgacgtgctacacctggttgagttctacctggaggaagggatcactgatgaagaagccatctccctcatcgacctggaggtgctgagacccaagcgggatgacagacagctagagattgcaaacaacagctcccagattctgcggctagtggagaccaaggactccatcggagatgaggacccgttcacagctaagctgagctttgagcaaggtggctcagagttcgtgccagtggtggtgagccggctggtgctgcgctccatgagccgccgggatgtcctcatcaagcgatggcccccacccctgaggtggcaatacttccgctcactgctgcctgacgcctccattaccatgtgcccctcctgcttccagatgttccattctgaggactatgagttgctggtgcttcagcatggctgctgcccctactgccgcaggtgcaaggatgaccctggcccatgaccagcatcctggggacggcctgcaccctctgcccgccttggggtctgctgggctgtgaaggagaataaagagttaaactgtcaaaaaaaaaaaaaaaaaaaskcgagggggggcccggtayycaatcgccctctcatgannngtattac

SEQ ID NO: 2407 - DNA, 1872 bp, Homo sapiens
ggcacgagagcccgggtcgagaggacgaggtgccgctgcctggagaatcctccgctgccgtcggctcccggagcccagccctttcctaacccaacccaacctagcccagtcccagccgccagcgcctgtccctgtcacggaccccagcgttaccatgcatcctgccgtcttcctatccttacccgacctcagatgctcccttctgctcctggtaacttgggtttttactcctgtaacaactgaaataacaagtcttgatacagagaatatagatgaaattttaaacaatgctgatgttgctttagtaaatttttatgctgactggtgtcgtttcagtcagatgttgcatccaatttttgaggaagcttccgatgtcattaaggaagaatttccaaatgaaaatcaagtagtgtttgccagagttgattgtgatcagcactctgacatagcccagagatacaggataagcaaatacccaaccctcaaattgtttcgtaatgggatgatgatgaagagagaatacaggggtcagcgatcagtgaaagcattggcagattacatcaggcaacaaaaaagtgaccccattcaagaaattcgggacttagcagaaatcaccactcttgatcgcagcaaaagaaatatcattggatattttgagcaaaaggactcggacaactatagagtttttgaacgagtagcgaatattttgcatgatgactgtgcctttctttctgcatttggggatgtttcaaaaccggaaagatatagtggcgacaacataatctacaaaccaccagggcattctgctccggatatggtgtacttgggagctatgacaaattttgatgtgacttacaattggattcaagataaatgtgttcctcttgtccgagaaataacatttgaaaatggagaggaattgacagaagaaggactgccttttctcatactctttcacatgaaagaagatacagaaagtttagaaatattccagaatgaagtagctcggcaattaataagtgaaaaaggtacaataaacttttacatgccgattgtgacaaatttagacatcctcttctgcacatacagaaaactccagcagattgtcctgtaatcgctattgacagctttaggcatatgtatgtgtttggagacttcaaagatgtattaattcctggaaaactcaagcaattcgtatttgacttacattctggaaaactgcacagagaattccatcatggacctgacccaactgatacagccccaggagagcaagcccaagatgtagcaagcagtccacctgagagctccttccagaaactagcacccagtgaatataggtatactctattgagggatcgagatgagctttaaaaacttgaaaaacagtttgtaagcctttcaacagcagcatcaacctacgtggtggaaatagtaaacctatattttcataattctatgtgtatttttattttgaataaacagaaagaaattttgggtttttaatttttttctccccgactcaaaatgcattgtcatttaatatagtagcctcttaaaaaaaaaaaaaaacctgctaggatttaaaaataaaaatcagaggcctatctccactttaaatctgtcctgtaaaagttttataaatcaaatgaaaggtgacattgccagaaacttaccattaacttgcactactagggtagggaggacttagggatgtttcctgtgtcgtatgtgcttttctttctttcatatgatcaattctgttggtattttcagtatctcatttctcaaagctaaagagatatacattctggatacttgggaggggaataaattaaagttttcacactgaaaaaaaaaaaaaaaaaaaaa

SEQ ID NO: 2408 - DNA, 1365 bp, Homo sapiens
tacgaacttccggttctccgggcagctgccactgctgtagcttctgccacctgccacgaccgggcctctccctggcgtttggtcacctctgcttcattctccaccgcgcctatggtccctcttggagccagcgtggcgggcctggcggctcccgggtggtgagagagcggtccgggaacgatgaaggcctcgcagtgctgctgctgtctcagccacctcttggcttccgtcctcctcctgctgttgctgcctgaactaagcgggcccctggcagtcctgctgcaggcagccgaggccgcgccaggtcttgggcctcctgaccctagaccacggacattaccgccgctgccaccgggccctacccctgcccagcagccgggccgtggtctggctgaagctgcggggccgcggggctccgagggaggcaatggcagcaaccctgtggccgggcttgagacggacgatcacggagggaaggccggggaaggctcggtgggtggcggccttgctgtgagccccaaccctggcgacaagcccatgacccagcgggccctgaccgtgttgatggtggtgagcggcgcggtgctggtgtacttcgtggtcaggacggtcaggatgagaagaagaaaccgaaagactaggagatatggagttttggacactaacatagaaaatatggaattgacacctttagaacaggatgatgaggatgatgacaacacgttgtttgatgccaatcatcctcgaagataagaatgtgccttttgatgaaagaactttatctttctacaatgaagagtggaatttctatgtttaaggaataagaagccactatatcaatgttgggggggtatttaagttacatatattttaacaacctttaatttgctgttgcaataaataccgtatccttttattatatctttatatgtatagaagtactctrttaatgggctcagagatgttggggataaagtatactgtaataatttatctgtttgaaaattactataaaacggtgttttctgatcggtttttgtttcctgcttaccatatgattgtaaattgttttatgtattaatcagttaatgctaattatttttgctgatgtcatatgttaaagagctataaattccaacaaccaactggtgtgtaaaaataatttaaaatttcctttactgaaaggtatttcccatttttgtggggaaaagaagccaaatttattactttgtgttggggtttttaaaatattaagaaatgtctaagttattgtttgcaaaacaataaatatgattttaaattctcttaaagtggtccaaattatgtgtttatmmaataaacataagactatagaattaaaaatta

SEQ ID NO: 2409 - DNA, 1332 bp, Homo sapiens
ggcacgagtacgaacttccggttctccgggcagctgccactgctgtagcttctgccacctgccacgaccgggcctctccctggcgtttggtcacctctgcttcattctccaccgcgcctatggtccctcttggagccagcgtggcgggcctggcggctcccgggtggtgagagagcggtccgggaacgatgaaggcctcgcagtgctgctgctgtctcagccacctcttggcttccgtcctcctcctgctgttgctgcctgaactaagcgggcccctggcagtcctgctgcaggcagccgaggccgcgccaggtcttgggcctcctgaccctagaccacggacattaccgccgctgccaccgggccctacccctgcccagcagccgggccgtggtctggctgaagctgcggggccgcggggctccgagggaggcaatggcagcaaccctgtggccgggcttgagacggacgatcacggagggaaggccggggaaggctcggtgggtggcggccttgctgtgagccccaaccctggcgacaagcccatgacccagcgggccctgaccgtgttgatggtggtgagcggcgcggtgctggtgtacttcgtggtcaggacggtcaggatgagaagaagaaaccgaaagactaggagatatggagttttggacactaacatagaaaatatggaattgacacctttagaacaggatgatgaggatgatgacaacacgttgtttgatgccaatcatcctcgaagataagaatgtgccttttgatgaaagaactttatctttctacaatgaagagtggaatttctatgtttaaggaataagaagccactatatcaatgttgggggggtatttaagttacatatattttaacaacctttaatttgctgttgcaataaataccgtatccttttattatatctttatatgtatagaagtactctgttaatgggctcagagatgttggggataaagtatactgtaataatttatctgtttgaaaattactataaaacggtgttttctgatcggtttttgtttcctgcttaccatatgattgtaaattgttttatgtattaatcagttaatgctaattatttttgctgatgtcatatgttaaagagctataaattccaacaaccaactggtgtgtaaaaataatttaaaatttcctttactgaaaggtatttcccatttttgtggggaaaagaagccaaatttattactttgtgttggggtttttaaaatattaagaaatgtctaagttattgtttgcaaaacaataaatatgattttaaattctaaaaaaaaaaaaaaaaaaaa

SEQ ID NO: 2410 - DNA, 1615 bp, Homo sapiens
  misc_feature (1591)..(1591): n equals a,t,g, or c
  misc_feature (1599)..(1599): n equals a,t,g, or c
  misc_feature (1603)..(1603): n equals a,t,g, or c
  misc_feature (1609)..(1609): n equals a,t,g, or c
gctcgtgccgaattcggcacgagtgaccacgcagttcttgggtctgtgctgctggcctggggttgtggttgaggccgkgtctccgctcctgtgcccgggaagatggtgctaggtggttgcccggttagttacttacttctgtgcggccaggcggctttgctgctggggaatttacttctgctgcattgtgtgtctcggagccactcgcaaaatgcgaccgctgagcctgagctcacatccgctggcgccgcccagccggagggccccgggggtgctgcgagctgggaatatggcgacccccactctccggtcatcctctgctcttacctacctgatgaatttatagaatgtgaagacccagtggatcatgttggaaatgcaactgcatcccaggaacttggttatggttgtctcaagttcggcggtcaggcctacagcgacgtggaacacacttcagtccagtgccatgccttagatggaattgagtgtgccagtcctaggacctttctacgagaaaataaaccttgtataaagtataccggacactacttcataaccactttactctactccttcttcctgggatgttttggtgtggatcgattctgtttgggacacactggcactgcagtagggaagctgttgacgcttggaggacttgggatttggtggtttgttgaccttattttgctaattactggagggctgatgccaagtgatggcagcaactggtgcactgtttactaaaaagagctgccatcatggcccagggaggcgggtgaaagctccgtcttctgaattcatctctacaggctcaaaactcctctttgatatcagacctgatgttattttccttcttttggagggcatttgtttggttaagaaggcttctttggactttggaatttcaacccagattttaccttgcagacggaatgacaagcaaaaagtgttgtggggaatcaaatttgttcctttcctcatgcacaaaacataaaggatagtggcgagtttacaagctgtggatgggtttccatagtcttcctttctgtacattgctatatcttcagtcctttggagcaagtggacctaacaagttgagcaaaatgaatatttggatccatgttcctcttgtgaccctgagtcttcatgcaaggagatctgaagctgaacaatgaaaatcttcagcagaaatagaaatggccgtggattgtaatacacactgaaattctgactttctgaatttaaatgtagaataaattttaccaacttggagtactgtatgagtattttcagtagggggaataaactcaaaattatatttgttttgcagaaacctagtcatttgaaatgagccatcctattaagccctcttttgtctccattatgttccagaggcagtatatgcagtgcaataattttttcattccacttatgttttgaaagccagcggcatcagatgtgtgagttgagctattcctcctggcagaattgtccaatctaaaaatcagcgtttaccagcccatgctaataaaattaagatttcatacaagtttctgtaaaactattcttcatgattagctctccctgnggctgcancagncagaangagata

SEQ ID NO: 2411 - DNA, 3201 bp, Homo sapiens
  misc_feature (3198)..(3199): n equals a,t,g, or c
gggagtccgcgtaggaggggtcggaggtcttacccaacagattgacgcggcgttagtattggccgtgtacccgaaaaactgattgactgggctggcgttaactgtgcggaggcaggatttccctggggaaagtcttcactcagagcttcgctgacagccaaggatggcaagcaaggggccctcggcctctgcatctcctgagaactccagtgcaggggggcccagtgggagcagcaatggcgctggcgagagcggagggcaggacagcactttcgagtgcaacatctgcttggacacagccaaggatgccgtcatcagcctgtgtggccacctcttctgttggccgtgtttacatcagtggttggagaccagacctaacagacaggtgtgtcctgtttgcaaagctggcatcagccgagacaaggtcatccccctctatggaaggggcagcactgggcaacaggaccccagagagaagacccctcctcgtcctcaaggacagaggccagagccggagaatagagggggatttcaaggatttggatttggagatggtggcttccagatgtcttttggaattggggcatttccctttgggatatttgccacagcatttaatataaatgatgggcggcctcctccagctgtccctgggacaccccagtatgtggacgagcagttcctgtcacgcctcttcctatttgtggccctggtgatcatgttctggctcctgattgcctaatgctgggctcctgcctacatccgtggcagggctctggactggtgacgtgccaccccaactcctggtgtttggcttcctggctaatcttgactcctggaatcagtgggatcagtaacacatcaaggagtcttgtttcttcatcagagctttggaactcgagaccagttggcgatgacccctgaatatcgccaccgctgtaaacactctataacttcaggccttggcattgagtcatctctcatgggtgacaccatgaaatcttgtttcagccagttctgcaggtcctgactctgcagagggaagaggcagaaagagagaaactgtcagagtataatttcacctgagtttaatattacagaaacaaagggatgcaccaaatggtatttctggaaattttcatgtctttaaataccccttggtaagttgcttctgaagccagtgggggctcctcagatagagaggttcccctttcaaatcccagtgccgctctgttctctttccttcccctcccactccccctcttcttcctctgtagagatgcaagaaattgctgtcccataaaaatcataattgcagtagctaaagctggggtcacttcgtgaattcaccagagactcaaagatcttttattggctctgggctgtgctcagtgtctttggcctcagagaacaacttgaatgacttcctggtttcctggcataaattattcctggtgagacatgtggcttaactcacaggtttcccatcagctttctccctaaaactatgttcatctgcctctctctgccagagaacatacagccgagaatactgccgaagctgagactgactactgtgcattaggaaagacctggagtcaggactttggtgggatttggagctccgaggcagtaataactgaacaagcagccctgtcccctaggctgcagaagcttgaatgcatcctctcccagaacctgccacaggaaactgggggctttgtcaggtcagcccaactgcatgcaaaagaccaccatcctcagaagccaagttgtcttttatgaagaggcaaggaaaggggaaacccacatgtgaccctgattttggtatggcttgatagagttccctgaaaactccttgtatgtgtgctaaaaccagggaagcatgtgactgccaagcaggcaacccctgatgatttgtaaagccaggtggcagggccttggggagccccagcacaatgatattgtgtggtcttccctcctgtggaatcgaggggaaattattcttcccaataccttgatttgattttcagtttcataagcttcttcctctgaatcttattgagggactatggtaccaagcaggtaggactgttcacctggtggaacagttcttgctctgccttctaggcttcatcccagaaatccagcctctttctggagaccccaaagctggagggagatgggctttcctctgggcctctctcctactttgccatccacactgctcctggctaaccccagcaataaccaacaaatggtaggaagccccatctattgctttttctcaattatgactgcatagtttgtggaaacaaagatcttgaggaagatgagggaagccctcccctcttcatagtccccatctcttctcctttgtacctgtcaacaccagagttcagtgtttaaacagacaaaatataaagtattgagtaggtggttcatatgccgaatccacttggtaggaagaaaccaccagctttatagtgtgcctgatagattttaaacattcctgggcacccactcaagagtgctctttttatcaccttctggaaatccgcaaagttgcaggggcctctggagtgtctcttctctagagagaattggtgggacccccctcagtgcagtggccccaactagtggagggagagaggacttaagtcagatggactcaacagaaatgggtttccagaagaataatgaaaagttgtgggtaggaaaatgaatcatttggactcttcaatgaaatggagtgagcccaggagagctcagccaacagaggcactctgggaacctgttagtaaagccaggctggccaaatgccatttgattttgaacctcgtaggtccccactcaccctctgccaggagctaagtaaggcaggagagctgacttgggactcctggctcggccccaacagggagcccccttcccaccatccytcggcaagctcaccacctcatccttctgccaaggcagctttcctttcttttgtgtgttttctgtgttcttagcctccaccctcctcctgccacccttgtggactaggaccaggtcctgaccccagtcagaaaatgatgatatgtacagtggcacaccttaaccagtcactaattttcactgttgtgaaagtgatttgatttagaattaaacaaatggttttacattaaaaaaaaaaaaaaaaaaaaaaaaaaaagnnaa

SEQ ID NO: 2412 - DNA, 2774 bp, Homo sapiens
  misc_feature (2724)..(2724): n equals a,t,g, or c
  misc_feature (2743)..(2743): n equals a,t,g, or c
  misc_feature (2756)..(2756): n equals a,t,g, or c
  misc_feature (2764)..(2764): n equals a,t,g, or c
gtgctgagcttycctggggaggaggcgccgaggtgcccggtgcgggccgaggcagggctgggcctcgcgggcagcaggcggaagaaggaagggcggtggggcaggtcccggctgcgcggggcagttgtgcgcacttgggttcttcacgcgggacacacgtggaacgccgacccctgcgcccctggccgctggcaactggcaaggccgggaacagaaagtgtagggacagaagagcgctggagtcttccccgggagggagcccggggctgcagcccaggggcggggagcggggcggggctgggaaagttgagtactggtcgctcagggccgggctccgccggagtgcccggcgcagaaaccgtaaaaggctggagcgggcggggtaggtgtggctctgtgtgcgtgacctgagccccggtcccagtccctgtagtctcctgcggccgcggcctctcagccatgggcgccgtctggtccgccctgctggttggagggggtctggccggarcacttttcgtttggctgctgcggggcggccctggcgacaccgggaaggacggggatgcggagcaggagaaagacgcccctcttgggggagctgcgattccgggaggccatcagagtggcagcagcggactgagccctggaccttccgggcaggagctggtcaccaaaccagagcatcttcaagaaagcaatggacatttgatttctaagaccaaagaccttggtaaactgcaagcagcatcatggagattgcagaatccttccagggaagtctgtgacaattcaagagaacatgttccttctggacagtttccagacacagaagctccagctacctctgagaccagtaactctaggagttactctgaagtttcaagaaatgaaagccttgaatctcctatgggagaatggggattccaaaaaggacaagagatatctgctaaagcagctacatgttttgcagagaagttgccttctagcaacctgctcaagaacagagctaaagaagaaatgagcctctctgatttgaacagtcaggaccgggttgaccacgaggagtgggaaatggtgcctaggcactcatcttggggggatgttggtgtgggtggcagtcttaaggctccagtgttaaacctaaaccagggaatggacaatggaagaagcactttggtggaagcaagaggtcagcaagtgcatgggaaaatggaaagggtagcagtgatgcctgcagggtctcagcaagttagtgtcaggttccaggtccattatgtcacaagcactgatgtgcaattcattgcagtaactggagaccatgagtgtcttgggagatggaacacttacatcccactccactataacaaggatgggttctggtctcattccattttcctgcctgcagatacagtggtggagtggaagtttgtgttggtagagaatgggggagttacccgctgggaagaatgcagcaatagattcctagaaactggccatgaggataaagtggttcacgcatggtgggggattcactgattcagtttgcaaagtaatggagaagctgtagaacaatgtggaagaggctgaggttgtggaacacactgaataaaataaaggcagtgtgactccaaattcagccatctgaattgtttaaatttgctagtggattttgtctactgtgcagaaatatatatgtctaatgtgcagaaatatatatgtgtgtatgtgtgtatatatatgcacacacacacagataatgcttccagtgaatgtgaacttcttttccctgtggcactgattgacagacttgtgctgatccattattactttagggcttgattctcttggggagtgacttggctaagcttcaggtgtaaactgtggtcacggagcaaaaacattaaccagctgcccagggttcaagcttgagcctttaggtgatctttaaactatggtagtaaaataagcctcactcaaacatagctgacttcctattggtacagcttgaaaagcactttttactacatacacattttatgcttaaaaagttaacatgatacgaaactgtgattagaaaatatctggtctggatgtgattagtaaggatacaagataatgttctaagactgcctaatgctttttgtttgattttcatctgccaggcgttgttatgtgctatgagggtagcaagtacgtctttgtcttaatgatctaaggctggtgtagaaacaaagggcctaatgagaaccaatcatcatggaagtcagttgcgggggcagcccataaggaaagggaaagtgagtggggttgggcataggctgagtgaggtggcctgaatgacacctcttagaggactgtgaagtacaggcacagcccgactgcagggagggatgcacccatcatttacccatgggagcatctgtaggaccatctctctcccacttcttctcccctcccccaccgcatctggccagatggactgtcctacagcaatcgtttccatctgtcaccctcttccctctcctttcataccagtcactatcttgggtaacaaatttatacaggacagtggtacagaaatacatctttgctctgagaatacagcaaatattaacttaaattattataactgaacaaataataaaacctgaattttaatatcttcaaaaaaaaaaaaaaaaagggcggcgctctaaaaggatccctccgagggggcccaaagcnttaacgccgttgcatgccnaacgtccataagntcctcctnccctaataag

SEQ ID NO: 2413 - DNA, 2052 bp, Homo sapiens
ggcacgagcccatataagaaatggtcacagtcacaataatgaacatatccatcaccctcaaaagtttcctgtgtaccttgggagtccccccaaacattttttctcctgcccctaccttcccaagtaaccatggatcttctttctttcttttttttttttttcttaagacagaatcttgctctgtcgcccaggctggagcgcagtggtacaatctcagctcactgcaacctccgcctcccgggttcaagcaattatcctgtctcagcctcccgagtagctgggattacaggtgcccaccaccaagcccgcctaatttttgtatttttagtagagacggggtttcactatattggccaggctggtctcaaactcctgacctcaagtgatccgctcacctcggcctcccaaagtgctgggattacaggcgtgggccaccgcacccagccactttctttttgctatagattagtttgcattttctatcattttatacaaatgtaatcactcaacacatcctattttgtgcatggacataacatctaattatctccctggactttagatttcaagctctttgagaacaagatccattttttcttttctcttcctcttggccttcaacttatcttttctcagatatagcccttaatcattatttgcttgattgacataagaccttcatgaacttaaaaccaagcttcagtttggtggctaagaagtgcctgccacgttgaaggtttttaactcgccaccacttctggagaggttcctcagtcggcagcttcagcccagttaaaaaaaaataataataagcatatgagcttcatttaggtccgtggacttctaggagtccagaaagtgagagtcaaggtgtgggttggggtgtggggtggaaggggaggctcaggaagcgaggaatgaatacctgagaaaggtccttggctttcaccagattcttgatacaaagggatagactatggaattaatgccctgctctattcctatctgcttttcatgaatctgttgtttaattataaatcctttactatctgctcctcccttctcctcccttcccacctccccagcaccttcgttttgttctctgcctgccctggttatacttaaccttacttaactaaacacactacagggccctgtccagtagcagtgccacttcatgggaactgtttgcattccttttctctttaagagcttcttatctgaactatgtgatagattgtacctttttattcaatgattcttattccactttacttaacagtttaccctgaatacttggatgccactcacatatcacaaacctatactttctctaaaccccagagcctgggattccttttcatctcaaaaaaaaaaaacactgtttttgttgttataaataagtattatgagaaccagaagtaacaataaactgcaaattcaaaatcaagccacttctccatccagagacacctccctcacttccccttgtcaaacacaaaacatattttaaaacgatattatgtctgattttagataaaagtctgggatgtagaataacaataatctgcttctaaatgagaaaatcataggcatctgacaaatgctggtttcaaagttatctttccaaaatagaagcgagtaagaaaaacatctcacctgcttggccaaaagaccaacaccaactccccttcctccaaattcccctcgaccccatgcagttttgtttgtaagggactgatgtcttacacccagcagcatttcctagcttctgcttgggggtaagcttgtcattcctattctccctttcacctctaccgttttccaacagatgagcaaatacggtaacgatagcattttggtctagttcctgcacaaactcattcctctgcataaaaggcagacctttgaaaggtacttacgtggaagaggcaaaggcaagcgcaagccctgggtttggaagctgtgtttgctgatgccagcctgcttaaatagctgggctggctgacgcaggctgctgatagcacgtttatttacgcctatgagcacaca

SEQ ID NO: 2414 - DNA, 1083 bp, Homo sapiens
ggcacgagccaccatgcccggcctagattaaaaatttgaagacatattctctactatgagccaatgaaattactcattttgtttctatcccatttgctgtcccttgcttttggaattttgtgtcttagtgtgactgtgattctttctctccttttgtctttcagcaaacggggattcagcgtccgatcctttggaacagggactcacgtgaagcttccaggaccagctcccgacaagcccaatgtttatgatttcaaaaccacatatgaccagatgtacaatgatcttcttaggaaagacaaagaactctatacacagaatgggattttacatatgctggacagaaataagagaatcaagccccggccagaaagattccagaactgcaaagacctgtttgatctgatcctcacttgcgaagagagagtgtatgaccaggtggtggaagatctgaattccagagaacaggagacctgccagcccgtgcacgtggtcaatgtggacatccaggacaaccacgaggaggccaccctgggggcgtttctcatctgtgagctctgccagtgtatccagcacacggaagacatggagaacgagatcgacgagctgctgcaggagttcgaggagaagagtggccgcacctttctgcacaccgtctgcttctactgagcccagcgcccgcatggagccgcctctggagcttcctgttgttcatactttttccttcctgacatttgtttttacttacaggtgttctgctggtgacggtagcattacccaaataaactgtgcatatgaaatgggagaggagatgccaaaacgccagatgaaagcaatcaagtttcttcttttccacttttacttatgagcgggatattgattacaaagtttttcttctttaaccaaaaaggaaagacaacggtttatgtgcacttcccgacatacctgtgtcttcgtgtgcctgccttccctccctcctccccaccgggccggactgtacagagccctgctgcggcgtgttaggaatgacctggaattgtcaataaacagatgctgctgtcaaaaaaaaaaaaaaaaaaaaaa

SEQ ID NO: 2415 - DNA, 839 bp, Homo sapiens
  misc_feature (18)..(18): n equals a,t,g, or c
  misc_feature (87)..(87): n equals a,t,g, or c
  misc_feature (265)..(265): n equals a,t,g, or c
cttcacaacgggatcagngtcgatccttggacagggctcacgtaagttccaggccagttccgcaagccaakgttargattcaaaccncatatgcccarawgkccaatgtcttcttagraaagcmaagaactttatccccagaatgggattttacatatgtggacagaattagagaatcaagcccggccagaaagattccagaactgcaaagacctgtttgatctgatcctcacttgcgaagagagagtgtatgaccaggtggtgnaagatctgaattccagagacaggagacctgccagcccgtgcacgtggtcaatgtggacatccaggacaaccacgaggaggccaccctgggggcgtttctcatctgtgagctctgccagtgtatccagcacacggaagacatggagaacgagatcgacgagctgctgcaggagttcgaggagaagagtggccgcacctttctgcacaccgtctgcttctactgagcccagcgcccgcatggagccgcctctggagcttcctgttgttcatactttttccttcctgacatttgtttttacttacaggtgttctgctggtgacggtagcattacccaaataaactgtgcatatgaaatgggagaggagatgccaaaacgccagatgaaagcaatcaagtttcttcttttccacttttacttatgagcgggatattgattacaaagtttttcttctttaaccaaaaaggaaagacaacggtttatgtgcacttcccgacatacctgtgtcttcgtgtgcctgccttccctccctcctccccaccgggccggactgtacagagccctgctgcggcgtgt

SEQ ID NO: 2416 - DNA, 1084 bp, Homo sapiens; identical to SEQ ID NO: 1211

SEQ ID NO: 2417 - DNA, 693 bp, Homo sapiens
  misc_feature (85)..(85): n equals a,t,g, or c
  misc_feature (669)..(669): n equals a,t,g, or c
  misc_feature (682)..(682): n equals a,t,g, or c
agatggtgtttccccacgttggtcagtctggtctcaaattcctgacctcaggtgatctgcctgcctcggcctcccaaagtgctgngattacagacgtcagccaccatgcctggcctgaaaccttttttaggtaaagttgaattccatccttaaaagtttctgttatatcctatttagccattttctattgtctcccaaagaattcacatcaaaaaaacagctttgaactcccccttcaaaggaaacagtcgactttcataattagcatctaccattatccccaaatcttattttattcattgacttgaaattttttccaattgctttttttttttttttttaaggttaagagcagaggtttactaggccaaagaaagagaatagctctctgttgcagagaggggtcctggagaaatgggttaccccagttgtcttatttaaatggttacccatcagattttaattttatcttctctttgagagcttggtaataagaagcacttaaatcactccaaagaagactttaaaaagggagcagtgaaaaggtcttaataatttattgattgaattaagaaatactagctaattaagaatctgagtctaaacagcacagattttttctttctgcttttaaattgkgttttaaaaaaaaaaaaaaaaaaaaaaaanaaaaaaggaggtngagccagggag

SEQ ID NO: 2418 - DNA, 2085 bp, Homo sapiens
ccacgcgtccgggggacagagccatcctcctttgacacctggtcttcagttctgtgcccaacgtatatagttttgacaatgaccaggttggactgtttaatgtctttcaacttaccacgtaatcctcttgtagggatcacatctttctttatgatattgtatttctctacctctaacagtaaaaattccattcaacccttaaagctcacttcaaattcttctttgagaagtttttcctttctccgcaaccagatgtacatatttgaactctctttgtacttggagggcacttctttcgtggtagttcttttatttttattaatctctgtatccttagatagtcctccaacaaccaaaggttggggactctgtcttacatatctgggtgccctcatagtgcagtaataagtaagttgattatatacgagctatgtaacttatattttttaatggttggatatcactgagtttttttttttaagaatttttttattgaggtaaacttcacataacataaaattaactattttaaagtgagaagttcagtgccacttagtattgttaacaatgttgcataaccaccacctttatttaaagttccaaaaaaaatgttctcctctaaaaggaaaccccatcccattaagcagatactctccattccttccttcctccagcccccagcaaccaccaatctgctttctgtctctatggttttatctattcttgctattttatataaatcgaattgtatgagaccttttgtgtctggcttctttcacttagtacaagtttttgagatttatttacatagtagcatgtatcaacacttcatttttatggccaaataaaattgtattatgtgtttataacacaatttatttatccactcattcattgatggactttgggttgtttctgacttttggctattgggaatagtgctgctatgaatgtttgtgtacctgtatttgtttgaatgcctattttgcattctcttggatatatatctaggagtggaactgctgggtcatatgttaattctatgtttagctttttgaggaacagacaaactgttttccacagcagttgaaccattccacattcccaccagcaatgtatgagaattccaatttctgtccacttcctcaccaacacttattattttccttttcctttttttaaaaaaaataagttatggccatcttagtgggtgtgaagtggtatctcattgtgttttttatttgcatttcctatgtaatgagctagaaactaaagtacaaactagatgggacatccagtccctttgatagataatgctgagtaaaaaatgagatgaaagacatttgtttgtttttagaacatgagtgacagtttgttaaaaagctttagaggaggaatgaaaacaaagtgaagtacacttagaaaagggccaagtggacatcttggatgtcaagtgcctagttcagtatcttttttttttttttttttttttttgagacagtgcctcactctgtcacccaggctggagtgtagtggcatgatctgggctcactgcaacctcctcctcctggattcaagcaattctcttgcttcagcctcccaagtagctgagactacaagcacccaccaccacacccggctaattttgtatttttcagtagagacggggtttcgccacattggccgtgttggtcttgaactcctggcctcaagcaatccgcctacctcagcctcccaaagtgctaggattacaggcataagccactgagcccagccctagttcagtatcttttatgtaaattataaacatctgcaacattatgtatcatatgcagatacttattgcatttcttttattagtggtgaaagtgttctatgcatttattggctcttgaatttcctcatctatgaattgtcattcacacacctacttttctgcttcgtttttacatatgtctttgcctattaaagatattatccctctgttttatattttctctcattcttgtattgccttttaaattttgttatgatgtttcattaataaacagtgttttgttttcctctataaaaaaaaaaaaaaaa

SEQ ID NO: 2419 - DNA, 1707 bp, Homo sapiens
gtccagcttcatccgcagaggagcctcggccaggcttgccagggcgcccccagcccctccccaggccgcgagcgcccctgccgcggtgcctggcctccccgcccagactgcagggacagcacccggtaactgcgagtggagcggaggacccgagcggctgaggagagaggaggcggcggcttagctgctacggggtccggccggcgccctcccgaggggggctcaggaggaggaaggaggacccgtgcgagaatgcctctgccctggagccttgcgctcccgctgctgctctcctgggtggcaggtggtttcgggaacgcggccagtgcaaggcatcacgggttgttagcatcggcacgtcagcctggggtctgtcactatggaactaaactggcctgctgctacggctggagaagaaacagcaagggagtctgtgaagctacatgcgaacctggatgtaagtttggtgagtgcgtgggaccaaacaaatgcagatgctttccaggatacaccgggaaaacctgcagtcaagatgtgaatgagtgtggaatgaaaccccggccatgccaacacagatgtgtgaatacacacggaagctacaagtgcttttgcctcagtggccacatgctcatgccagatgctacgtgtgtgaactctaggacatgtgccatgataaactgtcagtacagctgtgaagacacagaagaagggccacagtgcctgtgtccatcctcaggactccgcctggccccaaatggaagagactgtctagatattgatgaatgtgcctctggtaaagtcatctgtccctacaatcgaagatgtgtgaacacatttggaagctactactgcaaatgtcacattggtttcgaactgcaatatatcagtggacgatatgactgtatagatataaatgaatgtactatggatagccatacgtgcagccaccatgccaattgcttcaatacccaagggtccttcaagtgtaaatgcaagcagggatataaaggcaatggacttcggtgttctgstaagtagcatttggtcatggtgtcttagctattcccaatgaagcattctccccatatctccttcctccctctatttctctcctttctttgtcttcctcgccttctccctctcccttactctcactctgtgtgtgtgtgcagtgtttaactctctgcctcagccttctcttctttgctaattggaccacatctccaatactcactgaagttgtaggcactaaacttaaagaacagcaagggtacttaatatctttctggccatgacatacttcaaatactgaacataacatttaaggacaaaagacactgagcaaatttatctatcaggatagactgagttatgatgcagtaacaagcaaacctaaaataacagtggcttaaamccacaaaggttttttaaccaagtgaatccggacgttttccagaatgcacaaccaaaacaaagtaaggcaaagctgatcttcattaaagtatgattactttatctgtcatcctcaacgctggatccacttgttttaatgtatatagcagagagttccattgttcttgctggtgaattatttaatactttttgttaaaactttaaatttataaaccagacatctaacaataaaatgtcactgctattaataactacagcaacaataaaggtttatttctcactcaaaaaaaaaaa

SEQ ID NO: 2420 - DNA, 1546 bp, Homo sapiens
  misc_feature (3)..(3): n equals a,t,g, or c
  misc_feature (30)..(30): n equals a,t,g, or c
  misc_feature (1499)..(1499): n equals a,t,g, or c
  misc_feature (1510)..(1510): n equals a,t,g, or c
  misc_feature (1519)..(1519): n equals a,t,g, or c
  misc_feature (1539)..(1539): n equals a,t,g, or c
  misc_feature (1544)..(1544): n equals a,t,g, or c
cgnccgtctagaactagtggatccccgggntgcaggaattcggcacgagcgtcgagaatgcytctgccctgragccttgcgctcccgctgctgctctcctgggtggcaggtggtttcgggaacgcggccagtgcaaggcatcacgggttgttagcatcggcacgtcagcctggggtctgtcactatggaactaaactggcctgctgctacggctggagaagaamcagcaagggagtctgtgaagctacatgcgaacctggatgtaagtttggtgagtgcgtgggaccaaacaaatgcagatgctttccaggatacaccgggaaaacctgcagtcaagatgtgaatragtgtgaatgaaaccccggccatgccamcacagatgtgtgaatacmcacggaagctacaagtgcttttgcctcagtggccacatgytcatgccagatgctacgtgtgtgaactctaggmcatgtgccatgataaactgtcagtacagctgtgaagacacagaagaagggccacagtgcctgtgtccatcctcaggactccgcctggccccaaatggaagagactgtctagatattgatgaatgtgcctctggtaaagtcatctgtccctacaatcgaagatgtgtgaacacatttggaagctactactgcaaatgtcacattggtttcgaactgcaatatatcagtggacgatatgactgtatagatataaatgaatgtactatggatagccatacgtgcagccaccatgccaattgcttcaatacccaagggtccttcaagtgtaaatgcaagcagggatataaaggcaatggacttcggtgttctgctatccctgaaaattctgtgaaggaagtcctcagagcacctggtaccatcaaagacagaatcaagaagttgcttgctcacaaaaacagyatgaaaaagaaggcaaaaattaaaaatgttaccccagaacccaccaggactcctacccctaaggtgaacttgcagcccttcaactatgaagagatagtttccagaggcgggaactctcatggaggtaaaaaagggaatgaagagaaaatgaaagaggggcttgaggatgagaaaagagaagagaaagccctgaagaatgacatagaggagcgaagcctgcgaggagatgtgtttttccctaaggtgaatgaagcaggtgaattcggcctgattctggtccaaaggaaagcgctaacttccaaactggaacataaagcagatttaaatatctcggttgactgcagcttcaatcatgggatctgtgactggaaacaggatagagaagatgattttgactggaatcctgctgatcgagataatgctattggcttctatatggcagttccggccttggcaggtcacaagaaagacattggccgattgaaacttctcctacctgacctgcaaccccaaagcaacttctgtttgctctttgattaccggctggcccggaaacaaaagtccgggaaaacttcnagtggtttggngaaaaaccngtaacaatgcccctgggcantgggnaa

SEQ ID NO: 2421 - DNA, 1344 bp, Homo sapiens
  misc_feature (1)..(5): n equals a,t,g, or c
  misc_feature (16)..(16): n equals a,t,g, or c
  misc_feature (21)..(21): n equals a,t,g, or c
  misc_feature (23)..(23): n equals a,t,g, or c
  misc_feature (1331)..(1331): n equals a,t,g, or c
  misc_feature (1336)..(1336): n equals a,t,g, or c
  misc_feature (1343)..(1343): n equals a,t,g, or c
nnnnnagcgctcgatnagaanyngcktgctccaaaaacagyatgaaaaagaaggcaaaaattaaaaatgttaccccagaacccaccaggactcctacccctaaggtgaacttgcagcccttcaactatgaagagatagtttccagaggcgggaactctcatggaggtaaaaaagggaatgaagagaaaatgaaagaggggcttgaggatgagaaaagagaagagaaagccctgaagaatgacatagaggagcgaagcctgcgaggagatgtgtttttccctaaggtgaatgaagcaggtgaattcggcctgattctggtccaaaggaaagcgctaacttccaaactggaacataaagatttaaatatctcggttgactgcagcttcaatcatgggatctgtgactggaaacaggatagagaagatgattttgactggaatcctgctgatcgagataatgctattggcttctatatggcagttccggccttggcaggtcacaagaaagacattggccgattgaaacttctcctacctgacctgcaaccccaaagcaacttctgtttgctctttgattaccggctggccggagacaaagtcgggaaacttcgagtgtttgtgaaaaacagtaacaatgccctggcatgggagaagaccacgagtgaggatgaaaagtggaagacagggaaaattcagttgtatcaaggaactgatgctaccaaaagcatcatttttgaagcagaacgtggcaagggcaaaaccggcgaaatcgcagtggatggcgtcttgcttgtttcaggcttatgtccagatagccttttatctgtggatgactgaatgttactatctttatatttgactttgtatgtcagttccctggtttttttgatattgcatcataggacctctggcattttagaattactagctgaaaaattgtaatgtaccaacagaaatattattgtaagatgcctttcttgtataagatatgccaatatttgctttaaatatcatatcactgtatcttctcagtcatttctgaatctttccacattatattataaaatatggaaatgtcagtttatctcccctcctcagtatatctgatttgtataagtaagttgatgagcttctctctacaacatttctagaaaatagaaaaaaaagcacagagaaatgtttaactgtttgactcttatgatacttcttggaaactatgacatcaaagatagacttttgcctaagtggcttagctgggtctttcatagccaaacttgtatatttaaattctttgtaataataatatccaaatcatcaaaaaaaaaaaaaaangggcnggccccnt

SEQ ID NO: 2422 - DNA, 2174 bp, Homo sapiens
ggcacgagcgtgcgagaatgcctctgccctggagccttgcgctcccgctgctgctctcctgggtggcaggtggtttcgggaacgcggccagtgcaaggcatcacgggttgttagcatcggcacgtcagcctggggtctgtcactatggaactaaactggcctgctgctacggctggagaagaaacagcaagggagtctgtgaagctacatgcgaacctggatgtaagtttggtgagtgcgtgggaccaaacaaatgcagatgctttccaggatacaccgggaaaacctgcagtcaagatgtgaatgagtgtggaatgaaaccccggccatgccaacacagatgtgtgaatacacacggaagctacaagtgcttttgcctcagtggccacatgctcatgccagatgctacgtgtgtgaactctaggacatgtgccatgataaactgtcagtacagctgtgaagacacagaagaagggccacagtgcctgtgtccatcctcaggactccgcctggccccaaatggaagagactgtctagatattgatgaatgtgcctctggtaaagtcatctgtccctacaatcgaagatgtgtgaacacatttggaagctactactgcaaatgtcacattggtttcgaactgcaatatatcagtggacgatatgactgtatagatataaatgaatgtactatggatagccatacgtgcagccaccatgccaattgcttcaatacccaagggtccttcaagtgtaaatgcaagcagggatataaaggcaatggacttcggtgttctgctatccctgaaaattctgtgaaggaagtcctcagagcacctggtaccatcaaagacagaatcaagaagttgcttgctcacaaaaacagtatgaaaaagaaggcaaaaattaaaaatgttaccccagaacccaccaggactcctacccctaaggtgaacttgcagcccttcaactatgaagagatagtttccagaggcgggaactctcatggaggtaaaaaagggaatgaagagaaaatgaaagaggggcttgaggatgagaaaagagaagagaaagccctgaagaatgacatagaggagcgaagcctgcgaggagatgtgtttttccctaaggtgaatgaagcaggtgaattcggcctgattctggtccaaaggaaagcgctaacttccaaactggaacataaagatttaaatatctcggttgactgcagcttcaatcatgggatctgtgactggaaacaggatagagaagatgattttgactggaatcctgctgatcgagataatgctattggcttctatatggcagttccggccttggcaggtcacaagaaagacattggccgattgaaacttctcctacctgacctgcaaccccaaagcaacttctgtttgctctttgattaccggctggccggagacaaagtcgggaaacttcgagtgtttgtgaaaaacagtaacaatgccctggcatgggagaagaccacgagtgaggatgaaaagtggaagacagggaaaattcagttgtatcaaggaactgatgctaccaaaagcatcatttttgaagcagaacgtggcaagggcaaaaccggcgaaatcgcagtggatggcgtcttgcttgtttcaggcttatgtccagatagccttttatctgtggatgactgaatgttactatctttatatttgactttgtatgtcagttccctggtttttttgatattgcatcataggacctctggcattttagaattactagctgaaaaattgtaatgtaccaacagaaatattattgtaagatgcctttcttgtataagatatgccaatatttgctttaaatatcatatcactgtatcttctcagtcatttctgaatctttccacattatattataaaatatggaaatgtcagtttatctcccctcctcagtatatctgatttgtataagtaagttgatgagcttctctctacaacatttctagaaaatagaaaaaaaagcacagagaaatgtttaactgtttgactcttatgatacttcttggaaactatgacatcaaagatagacttttgcctaagtggcttagctgggtctttcatagccaaacttgtatatttaaattctttgtaataataatatccaaatcataaaaaaaaaaaaaaaaa

SEQ ID NO: 2423 - DNA, 2314 bp, Homo sapiens
tccacgcgtccgcccacgcgtccgcggacgcgtgggtgcgagtggagcggaggacccgagcggctgaggagagaggaggcggcggcttagctgctacggggtccggccggcgccctcccgaggggggctcaggaggaggaaggaggacccgtgcgagaatgcctctgccctggagccttgcgctcccgctgctgctctcctgggtggcaggtggtttcgggaacgcggccagtgcaaggcatcacgggttgttagcatcggcacgtcagcctggggtctgtcactatggaactaaactggcctgctgctacggctggagaagaaacagcaagggagtctgtgaagctacatgcgaacctggatgtaagtttggtgagtgcgtgggaccaaacaaatgcagatgctttccaggatacaccgggaaaacctgcagtcaagatgtgaatgagtgtggaatgaaaccccggccatgccaacacagatgtgtgaatacccacggaagctacaagtgcttttgcctcagtggccacatgctcatgccagatgctacgtgtgtgaactctaggacatgtgccatgataaactgtcagtacagctgtgaagacacagaagaagggccacagtgcctgtgtccatcctcaggactccgcctggccccaaatggaagagactgtctagatattgatgaatgtgcctctggtaaagtcatctgtccctacaatcgaagatgtgtgaacacatttggaagctactactgcaaatgtcacattggtttcgaactgcaatatatcagtggacgatatgactgtatagatataaatgaatgtactatggatagccatacgtgcagccaccatgccaattgcttcaatacccaagggtccttcaagtgtaaatgcaagcagggatataaaggcaatggacttcggtgttctgctatccctgaaaattctgtgaaggaagtcctcagagcacctggtaccatcaaagacagaatcaagaagttgcttgctcacaaaaacagtatgaaaaagaaggcaaaaattaaaaatgttaccccagaacccaccaggactcctacccctaaggtgaacttgcagcccttcaactatgaagagatagtttccagaggcgggaactctcatggaggtaaaaaagggaatgaagagaaaatgaaagaggggcttgaggatgagaaaagagaagagaaagccctgaagaatgacatagaggagcgaagcctgcgaggagatgtgtttttccctaaggtgaatgaagcaggtgaattcggcctgattctggtccaaaggaaagcgctaacttccaaactggaacataaagatttaaatatctcggtgactgcagcttcaatcatgggatctgtgactggaaacaggatagagaagatgattttgactggaaacctgctgatcgagataatgctattggcttctatatggcagttccggccttggcaggtcacaagaaagacattggccgattgaaacttctcctacctgacctgcaaccccaaagcaacttctgtttgctctttgattaccggctggccggagacaaagtcgggaaacttcgagtgtttgtgaaaaacagtaacaatgccctggcatgggagaagaccacgagtgaggatgaaaagtggaagacagggaaaattcagttgtatcaaggaactgatgctaccaaaagcatcatttttgaagcagaacgtggcaagggcaaaaccggcgaaatcgcagtggatggcgtcttgcttgtttcaggcttatgtccagatagccttttatctgtggatgactgaatgttactatctttatatttgactttgtatgtcagttccctggtttttttgatattgcatcataggacctctggcattttagaattactagctgaaaaattgtaatgtaccaacagaaatattattgtaagatgcctttcttgtataagatatgccaatatttgctttaaatatcatatcactgtatcttctcagtcatttctgaatctttccacattatattataaaatatggaaatgtcagtttatctcccctcctcagtatatctgatttgtataagtaagttgatgagcttctctctacaacatttctagaaaatagaaaaaaaagcacagagaaatgtttaactgtttgactcttatgatacttcttggaaactatgacatcaaagatagacttttgcctaagtggcttagctgggtctttcatagccaaacttgtatatttaaattctttgtaataataatatccaaatcataaaaaaaaaaaaaaaaa

SEQ ID NO: 2424 - DNA, 2314 bp, Homo sapiens; identical to SEQ ID NO: 2423

SEQ ID NO: 2425 - DNA, 2314 bp, Homo sapiens; identical to SEQ ID NO: 2423

SEQ ID NO: 2426 - DNA, 2130 bp, Homo sapiens
  misc_feature (5)..(5): n equals a,t,g, or c
aaaanaaaaaaaccggctaaaactgtgtcaaaatgttcttaaggagcctatggtctccacggtgctaaaaagagcctggtgctgggccgactggcagggctgagcatcctcctgccccctcgccactgatgtttactaagcactctgagccaatgagacccccagcagcagaaagggcacaaggtggcgccagggcagcagggccagatctttctcatgcacctcgacctcttgcagactttcttcgtgagatgtactactcatttcaaaactgctttgcagggctcccctatgtattcggggggcccacggcacactcaggctggakatccktcctcactgcgctcaagatggcctcagcagacaccagttacccagctgaaagtcacaatccctcccagaagtctcccaacactagtgctgaccagaggtggggctctcaggctaggagtttcacacacaatgacaggctgctgggggacattgcaggaccccttttcctctcctctccatgctagaagccagccctaggcagctgcagttactccctgtgactcagcagcaggctgattcaacacagctgcccacacaaagccagtggctaatacatctgtttacctttccctatcacccagacacaagcccctttcccaggtcaaaccacaggccgatgcatctccagtttgacagtcaaatcactacttccattgctactttagatcagccaaagtggtgactgctgcagtgtgtggctatccctacaaggcccacccaagggatgcccaaagcccaaccttctccagggctgcagcccagagcaaccccaccagcctaagtccagcagaggacctcccacccaatgtcttgttctaattagaaggggaagttagccacagaaaatcaacttatctataattacaaaattctcttgactcaccttaaagttcctattgacatctactgcttttaaacctatttgaaaactctgatactaaaacaaatgacactctaagaaagtttgggagccccatgctgagaaccatttctgtgcagtgaggatgtttccagaagctacttacctacatgtgaatgtgccattttctttccttttgtagagaaaatcccctttactttttggaacagtaatggcagcttctagtacagccattacagtttcatatgagaaaaattaagaataactataaaattgttaaaatatccaataatggataatgatggccagaagatttaacatacaaagtaattctcaatgtaaagctattcagctcttccaggttgaatgccctgtaacccaccctgaccttccacatcatcttcaaaaagcagtttctctgttccccatgattctcctataaggtaactctttagtcctccatttagcacattttaaatcctccaaagaataagtatcatgtgattattttagctttacaaaaaaaaagttgaatggcgttttattttcatggcctataagcaggtaccttagtagggcagatataggaaaaacaaattagagcaaaacaaatcctctacaaatccaaggcaggaaaagtggtggcagagtgactcattctcctgtccctcccatcaggtcaaatcaggaggctgcagtgaatgcctgttctttgaatgtgtagcagttgttcctgtaactctttaaaacttggctataggctgtttagcacagtacagattaaagatacagttacgtaaacagcaaagtaattttatagtgcttcatccatttatcatgctttggtttgctaattttttcacatacctttttctatcacagtctgttgcttttgtacacatttctcatattggggttcgacaggtaaacacaaactgctatttcagtagaaaaagttattgttatgaatattaaacccaataaattgtataaaggtaaatatcagtttgtgtttacctgtcgaaccccaatatgagaaatgtgtacaaaagcaacagactgtgatagaaaaaggtaaacacaaactgctatttcagtagaaaaagttattgttatgaatattaaacccaataaattgtataaaggtaaatatcaaaaaaaaaaaaaaaaaaaaaaaaaaaaaaaaaaaaaaaaaa

SEQ ID NO: 2427 - DNA, 2403 bp, Homo sapiens
  misc_feature (2)..(2): n equals a,t,g, or c
  misc_feature (18)..(18): n equals a,t,g, or c
  misc_feature (53)..(53): n equals a,t,g, or c
  misc_feature (94)..(94): n equals a,t,g, or c
  misc_feature (102)..(102): n equals a,t,g, or c
  misc_feature (207)..(207): n equals a,t,g, or c
  misc_feature (2389)..(2389): n equals a,t,g, or c
  misc_feature (2398)..(2398): n equals a,t,g, or c
ancgccagcaacgcggcntttttacggttcctggccttttgctggccttttgntcacatgtctttcctgcgttatcccctgattctgtggatanccgtattnccgcctttgagtgagctgataccgctcgccgcagccgaacgaccgagcgcagcgagtcagtgagcgaggaagcggaagagcgcccaatacgcaaaccgcctctcnccgcgcgttggccgattcattaatgcagctggcacgacaggtttcccgactggaaagcgggcagtgagcgcaacgcaattaatgtgagttagctcactcattaggcaccccaggctttacactttatgcttccggctcgtatgttgtgtggaattgtgagcggataacaatttcacacaggaaacagctatgaccatgattacgccaagctcgaaattaaccctcactaaagggaacaaaagctggagctccaccgcggtggcggccgctctagaactagtggatcccccgggctgcaggcaactaagagcatcaagaagcactatagatttagctaaacatccatgtaatgcctcaatggaatgtgacaagtgtcagaggcggcagaagaatagagcattttgctacttttgtaattctgtacagaagttaccaatttgtgcacagtgtgggaaaacaaagtgcatgatgaagtcttcagactgtgtcataaagcatgctggtgtatacagtactggccttgcaatggtgggtgcaatatgtgacttctgtgaagcttgggtttgccatggtaggaaatgtctcagtacacatgcttgtgcctgccctcttaccgatgctgagtgtgttgaatgtgaacgaggcgtgtgggaccatggaggcagaatattcagttgttctttttgccataactttctctgtgaagatgatcaatttgagcatcaagccagctgccaggttttagaggcagaaacatttaaatgtgtttcatgcaatcggcttggtcagcactcatgtctccgttgtaaggcttgtttctgtgatgatcatacaaggagcaaagtgtttaagcaagaaaaaggaaaacagcctccttgtcctaaatgtgggcatgaaactcaggagactaaggaccttagcatgtcaacacgctccctgaaatttggcaggcagactggaggtgaagagggagatggagcttctgggtatgatgcttattggaagaacctttcatctgataagtatggtgataccagctaccacgatgaggaggaggatgagtatgaagcagaggatgatgaagaggaagaagatgaaggcagaaaggattcagatactgagtcatcagatttgtttactaatttgaatttaggaaggacctatgctagtggctatgctcactatgaggaacaagagaactaggggagctgctctggtggccgtgtgtgagaggagcaggagtgagtgtgtgtgcttgatgaattgtgtgtggttgttcaaaagtaccttagccacttagccttgtgcagaagactagttacacttaatgggccaagcaatagggtgtagcgtttttatagaactgataatcaggcttatggcataagaaaaatgagtttcaaatttaagatgtttattgatcgaagcaattgaagtatcatggattggattgttactgatttcagtaaagtatgttttgccaattagatacatatatacaagataaaggaataggatggtaatatatttgtttgaaattaaattactgtttttattaaaaaatactgcttcattggkctgattttgtaaaatgtaatgagtaaaatgaattactgtatttttccttttatgtccacagaatgagagtcatatgttgttatattctaaattttcattaaatattcatgtcaccttgaaaaaaaaaaaaaaaaaaactcgagggggggcccggtacccaattcgccctatagtgagtcgtatacaattcactggccgtcgttttacaacgtcgtgactgggaaaaccctggcgttacccaacttaawcgccttgcarcayatccccctttcgccagctggcgtaatagcgaagaggcccgcaccgatcgcccttcccaacagttgcgcagcctgaatggcgaatggcaaattgtaagcgttaatattttgttaaaattcgcgttaaatttttgttaaatcagctcattttttaaccaataggccgaaatcggcaaaatcccttataaatcaaaagaatagaccgagatagggttgagtgttgttccagtttggaacaagagccactattaaagaacgkggactccaacgtcaaaggscgaaaaaccgctatcagggcgatggcccctacgggaccatcaccctaatcaagttttttggggtcnaggtgccgnaaagc

SEQ ID NO: 2428 - DNA, 836 bp, Homo sapiens
  misc_feature (1)..(1): n equals a,t,g, or c
  misc_feature (10)..(10): n equals a,t,g, or c
  misc_feature (58)..(58): n equals a,t,g, or c
  misc_feature (134)..(134): n equals a,t,g, or c
  misc_feature (825)..(825): n equals a,t,g, or c
ngtatcgcantgcgaagggatgtgtcaagcgataagtgggaacgcaggtttccagccnacgtgtaaacgcgccaggaattgtatcgactcactataggggaatgggtaccgggcccccctcgagtttttttttnttttttttcaaggtgacatgaatatttaatgaaaatttagaatataccaacatatgactctcattctgtggacataaaaggaaaaatacagtaattcattttactcattacattttacaaaatcagaccaatgaagcagtattttttaataaaaacagtaatttaatttcaaacaaatatattaccatcctattcctttatcttgtatatatgtatctaattggcaaaacatactttactgaaatcagtaacaatccaatccatgatacttcaattgcttcgatcaataaacatcttaaatttgaaactcatttttcttatgccataagcctgattatcagttctataaaaacgctacaccctattgcttggcccattaagtgtaactagtcttctgcacaaggctaagtggctaaggtacttttgaacaaccacacacaattcatcaagcacacacactcactcctgctcctctcacacacggccaccagagcagctcccctagttctcttgttcctcatagtgagcatagccactagcataggtccttcctaaattcaaattagtaaacaaatctgatgactcagtatctgaatcctttctgccttcatcttcttcctcttcatcatcctctgcttcatactcatcctcctcctcatcgtggtagctggtatcaccatacttatcaganaaaggttcttc

SEQ ID NO: 2429 - DNA, 408 bp, Homo sapiens
  misc_feature (66)..(66): n equals a,t,g, or c
ccagggtcgacccacgcgtccggtggcgactcaggtgggccttgagttatattttaactcagctgntcagttcccagggcacatttctggatcagaacccatgggaaacaggaggtactaagtgcaatgtcttagcattctgcaaaatggagatctgttgtccagcggcttatctcctttttagtaacccttctttctgaacccagggcccttttcagccttccctcatattttcttgagatcaaactttacttctttcttatttactaagaatttgcctgtttgaataagaacaaaacgctaaggtgggtagcctaagctgattttctgctggttacacgtgtctctcacaccacatttcctcaaagctaatctgaattctgtaggctaaaaatattcatgtagcaa

SEQ ID NO: 2430 - DNA, 541 bp, Homo sapiens
  misc_feature (45)..(45): n equals a,t,g, or c
  misc_feature (61)..(61): n equals a,t,g, or c
  misc_feature (64)..(64): n equals a,t,g, or c
  misc_feature (87)..(88): n equals a,t,g, or c
gttcaaacttttacctcctttccttattttacctaaggaatttgnccttgttttggattanganccaaaccgcttaagggtggggtnncctaaggctggattttctgctgggttacacgttcttcttcacacccacattccctcaaagctaatctgaatttctgtaggctaaaatattcatgtagcaatctgagaattgaaaactgcagataaccggccgggtatggtgactcatgcctgtaatcctagcactttgggaggccgaggtgggtggaccacctgaggttaggacttcaagaccagcctggccaacatggtgagaccccatctgtactaaaaatacaaaaatttgcctggtgtggtggtgcatgcctctagtcctagctactcgggaggctgaggcacgagaatcacttgaacctgggaggcggaggttgcagtgagtcgagataacactactgcattccagcctgggtgacagagtgagactccacctcaaaaaaaaaaaaaaaaaaaaaaaaaaaaaaaaaaaaaactcgag

SEQ ID NO: 2431 - DNA, 1026 bp, Homo sapiens
  misc_feature (2)..(2): n equals a,t,g, or c
  misc_feature (4)..(4): n equals a,t,g, or c
  misc_feature (1012)..(1012): n equals a,t,g, or c
tntngttaggtatytgcacttccsatttgggattaaatatgcygtggasaaagatgaacctgtccgtgatgaaaatggatattgcgtcagagttcccaaaggtgaagttggacttctggtttgcaaaatcacacaacttacaccatttaatggctatgctggagcaaaggctcagacagagaagaaaaaactgagagatgtctttaagaaaggagacctctatttcaacagtggagatctcttaatggttgaccatgaaaatttcatctatttccacgacagagttggagatacattccggtggaaaggggaaaatgtggccaccactgaagttgctgatacagttggactggttgattttgtccaagaagtaaatgtttatggagtgcatgtgccagatcatgagggtcgcattggcatggcctccatcaaaatgaaagaaaaccatgaatttgatggaaagaaactctttcagcacattgctgattacctacctagttatgcaaggccccggtttctaagaatacaggacaccattgagatcactggaacttttaaacaccgcaaaatgaccctggtggaggagggctttaaccctgctgtcatcaaagatgccttgtatttcttggatgacacagcaaaaatgtatgtgcctatgactgaggacatctataatgccataagtgctaaaaccctgaaactctgaatattcccaggaggataactcaacatttccagaaagaaactgaatggacagccacttgatataatccaactttaatttgattgaagattgtgaggaaattttgtaggaaatttgcatacccgtaaagggagacttttttaaataacagttgagtctttgcaagtaaaaagatttagagattattatttttcagtgtgcacctactgtttgtatttgcaaactgagcttgttggagggaaggcattattttttaaaatacttagtaaattaaatgaacaccaacaaaaaaaaaaaaaaaaaaagggnggcccttttaaagg

SEQ ID NO: 2432 - DNA, 1241 bp, Homo sapiens
  misc_feature (44)..(44): n equals a,t,g, or c
ccggcaacgcgcatacgactacacctgctccggagcccgcggcnggtacctgcagcggaggagctctgtcttccccttcatctcacgcgagcccggcgtcccgccgcgtgcgccccggcgcagcccgccagtccgcccggagcccgcccagtcgccgcgctgcacgcccggggtgaaccctctgccctcgctgggacagagggccccgcagccgtcatgctttccgccatctacacagtcctggcgggactgctgttcctgccgctcctggtgaacctctgctgcccatacttcttccaggacataggctacttcttgaaggtggccgccgtgggccggagggtgcgcakctacgggmagcggcggccggcgcgcaccatcctgcgggcgttcctggagaaagcgcgccagacgccacacaagccttttctgctcttccgcgacgagactctcacctacgcgcaggtggaccggcgcacaatcaagtggcccgggcgctgcacgaccacctcggcctgcgccagggagactgcgtggcgctccttatgggtaacgagccggcctacgtgtggctgtggctggggctggtgaagctgggctgtgccatggcgtgcctcaattacaacatccgcgcgaagtccctgctgcactgcttccagtgctgcggggcgaaggtgctgctggtgtcgccagaactacaagcagctgtcgaagagatactgccaagccttaaaaaagatgatgtgtccatctattatgtgagcagaacttctaacacagatgggattgactctttcctggacaaagtggatgaagtatcaactgaacctatcccagagtcatggaggtctgaagtcactttttccactcctgccttatacatttatacttctggaaccacaggtcttccaaaagcagccatgatcactcatcagcgcatatggtatggaactggcctcacttttgtaagcggattgaaggcagatgatgtcatctatatcactctgcccttttaccacagtgctgcactactgattggcattcacggatgtattgtggctggtgctactcttgccttgcggactaaattttcagccagccagttttgggatgactgcagaaaatacaacgtcactgtcattcagtatatcggtgaactgcttcggtatttatgcaactcaccacagaaaccaaatgaccgtgatcataaagtgagactggcactgggaaatggcttacgg

SEQ ID NO: 2433 - DNA, 873 bp, Homo sapiens
  misc_feature (31)..(31): n equals a,t,g, or c
  misc_feature (47)..(47): n equals a,t,g, or c
  misc_feature (811)..(811): n equals a,t,g, or c
  misc_feature (841)..(841): n equals a,t,g, or c
  misc_feature (849)..(849): n equals a,t,g, or c
  misc_feature (855)..(855): n equals a,t,g, or c
tcttctaacgaagggggaccttttaaggganattcctccaaacggantttgggcaratgatsycatctatatcactctgcccttttaccacagtgctgcactactgattggcattcacggatgtattgtggctggtgctactcttgccttgcggactaaattttcagccagccagttttgggatgactgcagaaaatacaacgtcactgtcattcagtatatcggtgaactgcttcggtatttatgcaactcaccacagaaaccaaatgaccgtgatcataaagtgagactggcactgggaaatggcttacgaggagatgtgtggagacaatttgtcaagagatttggggacatatgcatctatgagttctatgctgccactgaaggcaatattggatttatgaattatgcgagaaaagttggtgctgttggaagagtaaactacctacagaaaaaaatcataacttatgacctgattaaatatgatgtggagaaagatgaacctgtccgtgatgaaaatggatattgcgtcagagttcccaaaggtgaagttggacttctggtttgcaaaatcacacaacttacaccatttaatggctatgctggagcaaaggctcagacagagaagaaaaaactgagagatgtctttaagaaaggagacctctatttcaacagtggagatctcttaatggttgaccatgaaaatttcatctatttccacgacagagttggagatacattccggkgraaaggggaaaatgtggccaccactgaagttgctgatacagttggactggttgattttgccaanaagtaaatgtttatggagtgcatgtgccanatcatgangggtcncattggcatggcctccat

SEQ ID NO: 2434 - DNA, 1314 bp, Homo sapiens
ggcacagtcagctcaggcctgatgaccagtccaccaatcagctcagtactccgggccaggcacaagcctcagatttctcatagatatctccctcctggagcacaggctggaatgtggggccaatgacatgaaggtgtcgctgggcaagtgccagctgaagagtctgggcttcgacaaggtcttcatgtacctgagtgacagccggtgctcgggcttcaatgacagagacaaccgggactgggtgtctgtagtgaccccagcccgggatggcccctgtgggacagtgttgacgaggaatgaaacccatgccacttacagcaacaccctctacctggcagatgagatcatcatccgtgacctcaacatcaaaatcaactttgcatgctcctaccccctggacatgaaagtcagcctgaagaccgccctacagccaatggtcagtgctctaaacatcagagtgggcgggaccggcatgttcaccgtgcggatggcgctcttccagaccccttcctacacgcagccctaccaaggctcctccgtgacactgtccactgaggcttttctctacgtgggcaccatgttggatgggggcgacctgtcccgatttgcactgctcatgaccaactgctatgccacacccagtagcaatgccacggaccccctgaagtacttcatcatccaggacagatgcccacacactagagactcaactatccaagtggtggagaatggggagtcctcccagggccgattttccgtccagatgttccggtttgctggaaactatgacctagtctacctgcactgtgaagtctatctctgtgacaccatgaatgaaaagtgcaagcctacctgctctgggaccagattccgaagtgggagtgtcatagatcaatcccgtgtcctgaacttgggtcccatcacacggaaaggtgtccaggccacagtctcaagggcttttagcagcttggggctcctgaaagtctggctgcctctgcttctctcggccaccttgaccctgacttttcagtgactgacagcggaaagccctgtgctccatggctgccatctcacctcctgctgggcagggggcatgatgcgggccagtgctccagccacagaaaagaaagttcatgctttgttcagcctgccttcttttctcccttttaatcctggctgtcgagaaacagcctgtgtctttaaatgctgctttttctcaaaatgggacttgtgacggtgtacctgaggcccccatctccttaaagagtgtggcaaaataatgatttttaaatctcaaaaaaaaaaaaaaaaaaa

SEQ ID NO: 2435 - DNA, 1249 bp, Homo sapiens
  misc_feature (1242)..(1243): n equals a,t,g, or c
  misc_feature (1248)..(1248): n equals a,t,g, or c
ggcagagcttttcttgcctctaattcagagctcaaagatgaccagccacagttacttatctttccagacttttttgtgcttgtacaaatagttttcttattcttttaaacaaaagcagtatcgtattttacaggttacagaattctcttcgttttactgtgtcttgcggatgtgtcccttggacctgtctatatacataagtcgtgctttccttcaagttctcctcttcgttagcttaggagagccaagaaataaagactttcttacaaatgactgtttgagtttggctgatgtgtcctacagaaacctcaccatctctctctctgttctccctactctcttacgggtccttacctactaccatggcttggattatttttgtgtattctcatggcttccaactgttttacatctgcagtggttaattctcttgtcatctttacctgaagatcataaaaatgcctttctccctcttacccaccctttctgtgttactcaatattgtattttaactcccaagcctacagtttacccttgaacaacacaccaacacggggattggggctgtctgctgggtggcacctgtgcaatggtgactgggttctggctgtcacatgtgcaacagtgtgtgtgctgcagctgtcaccagtgcaacagtggctgtgttccaactgttccctgaagttttagccaaggtgatagtccgttttgtgtcacgttttgacctgatttatttttgcgatgatttgggattgtgattggataccatccttatgaatactgttttcttctttaaggaaagggggctgtatacagctttgatccagtagggtcttaccagagagactccttcaaggctggaggctcagcaagtgccatgctacagcccctgcttgacaaccaggttggttttaagaacatgcagaatgtggagcatgttccgctgtccttggacagagccatgcggctggtgaaagatgtcttcatttctgcggctgagagagatgtgtacactggggacgcactccggatctgcatagtgaccaaagagggcatcagggaggaaactgtttccttaaggaaggactgatctgtgtgctcttatcaccaatcagttcagacctggttgattttgtactttggaactgtaccttggatggttttgtttattaaaagagaaacctgaagtaaaaaaaaaaaaaaaaaaactcgagggggggcccgtacccaaaaccctatacnnattgna

SEQ ID NO: 2436 - DNA, 1249 bp, Homo sapiens; identical to SEQ ID NO: 2435
  misc_feature (1242)..(1243): n equals a,t,g, or c
  misc_feature (1248)..(1248): n equals a,t,g, or c

SEQ ID NO: 2437 - DNA, 2320 bp, Homo sapiens
atgaagtgcaaccttcacatgaatgggaatgttatcacctcagaccagcccatcctgctgcggctgagtgacagcccatcaatgaaaaaggagagcgagctgcctcgcagggtgaactctgcctcctcctccaacccccctgccgaagtggaccctgacaccatcctgaaggcactcttcaagtcctcaggggcctcttgaccacgcagcccacagaattcaaaatcaagctttgagcaggggagtgaggcagccagaagtgggggcagaggagggtggctctgtttccccaaggcaaagcttatgaccaatgggccatcggactggagacccctgattgtgggaagggttgccagggataaagagcttcctcactggatgggacccgcctttctgtgttgtgttctgccctgtgctcttctctctacgttaacgtttcctgtagtatgtttcttcatctcatcgccaaggtaggcttgttttttcagtgtgtgcctccccgagcctcagccccaagctgatttcttatctggaaatggtacactgaattctctgggtggctttcttgtggccccatgggatgcagcgtgggggctgtctgaaggaccctgctttttccaggggccgaggggctgcctttcctttgtgtgtattaagcttttcaaacaatggaggggatggagagccctggtgtcctgacgggagccaggtcggcctgagagctgtgccgctcctctgtttgtcagtggaggtgcctgggtggggagcaggtctcaggcctcttgtcctctccccagtggctccaggcctcactagtggcaagggcaggatgaggctgcaccgctgggaagagtctatctaagttcttggcttggagtcccgtgtcgtctccgcccagaggaagttctccagagttcacctttcccttttccttgagttgtgctgaatgccccaccccagctctctttcccttctgggtgtctttgctgggagggggctgtgttgtgagccctcccggttctcacctcgcctggcacttaaccacaccctggttttgtgtagccgccagctctcttctggttgggcctttgaaaggctcagcctcccattgtgcagtgcttgggtttggagcttatttgaatggaagaggtcagtttgttcctggctctccatttctggcctcagttgtctacaggacagtggtcagggatgcctggaggcatatatccagctgccaccaaggggcactgtttgttcccacttatgtgagtgaccccatccatccatgaccagaggattattttcctgccttggcagaggaggaggagtcaagggagcagggcagctctaccaggcaaggtgtttccccagcataggcgcagacagttgggacgaaacttcagagcccaggcagtccctgaatgaccaggccagtgttgtcactgagtggtcccctgctggttgggagtgaagagaatccaggctggcagagctggagccagttggggagcacggttctgggagctctgcaaaatcagtagcaagtgctggaaaaggcacatgccgaagatactcaagagctcccaagatttgcttgaggctagcccagtgaaaaaaaccagagactcatgtttccaggggtcagtctgtcaggcaggaaggacccaggatttgaacccagcttcagtgtgcaggctctgaggctgcccaggacgggaaagtccaaggaaggggcctggtggtgctccacttgcagttctttaaagaatgctgcttttattctcctaaccctttcaagtgggtgcagacttctcgttagcagctggaagacattcctcccacacttttcccttcctggcccaagagagcatccagaaggcagtaggacctggtttttcaggtactgggagccgggggctcactgcttgcactgtgcttagggtagggatggtaaatatcctccctgcatggctttatcctccctctcatcccaaagcaggtatcttctggttgtcacagagtttcattgagtccagctgcagccacgtggccatctggagctggtgctataggtgaccatctggtacattgaggggacctgtttgcctcctccactctataagcagtcatcttgggagaccgggaggagaaggtggtgggctagtcctgtgtcctcctccacttcccatgcctctatgttacccatctgtgtctcctgtgcagaaggagaggaaggggcattaagagatgaagggtgattatgtattacttatccatttctgaataaacatttgttattcctaaaaaaaaaaaaaaaaaa

SEQ ID NO: 2438 - DNA, 2027 bp, Homo sapiens
ggcacgaggggaattctgcctagaagctggatgagctgttgaggatcctgtggctgagttggagccatctctcttgctctgctcaggtatggatgtgtttgtgcctctgtcagcctttgactttgacattttgtgtgtttcatcctgccaggctccttcatacgagtgtgggtagggaactcctctgtgctgttttcttagtttttttagtgcacccaggggcctgtgaggatgggccacagatagctgtctgcttgtgtctaatgacattgcgtgtttgccatttgggaaaccagaatggcatggcctcagtcacggccatgactggttgggtgacttgtgtgctctgaatgcctcacacatgagtgtgattggctgcactccggcctgtgcagcagagcgggactcggcctcaaaaaaaaagagaaacagaggcagaaagtagaacagtggtttcaggaggggagaatggagagttccttaatgaacagagtttgttgtgcaagatgaaaaaattttagagatgggtggttgtgatggttgcacagcaatatgaacatacctaatgccactaaacggtgtactttgaaatgattaaaatggtaaattgttcgtatatttttccacagcaaaaaaaaaaaaaaaaaaccaaatacgtcctctttgtcaacgtggccagctactgaggcctgacgggccagtacattgaactgaatgcactacaggaagagcttgcaccattcggtctggtcattctgggctttccctgcaaccaatttggaaaacaggaaccaggagagaactcagagatccttcctaccctcaagtatgtccgaccaggtggaggctttgtccctaatttccagctctttgagaaaggggatgtcaatggagagaaagagcagaaattctacactttcctaaagaactcctgtcctcccacctcggagctcctgggtacatctgaccgcctcttctgggaacccatgaaggttcacgacatccgctggaactttgagaagttcctggtggggccagatggtatacccatcatgcgctggcaccaccggaccacggtcagcaacgtcaagatggacatcctgtcctacatgaggcggcaggcagccctgggggtcaagaggaagtaactgaaggccgtctcatcccatgtccaccatgtaggggagggactttgttcaggaagaaatccgtgtctccaaccacactatctacccatcacagacccctttcctatcactcaaggccccagcctggcacaaatggatgcatacagttctgtgtactgccaggcatgtgggtgtgggtgcatgtgggtgtttacacacatgcctacaggtatgcgtgattgtgtgtgtgtgcatgggtgtacagccacgtgtctacctatgtgtctttctgggaatgtgtaccatctgtgtgcctgcagctgtgtagtgctggacagtgacaaccctttctctccagttctccactccaatgataatagttcacttacacctaaacccaaaggaaaaaccagctctaggtccaattgttctgctctaactgatacctcaaccttggggccagcatctcccactgcctccaaatattagtaactatgactgacgtccccagaagtttctgggtctaccacactccccaaccccccactcctacttcctgaagggccctcccaaggctacatccccaccccacagttctccctgagagagatcaacctccctgagatcaaccaaggcagatgtgacagcaagggccacggaccccatggcaggggtggcgtcttcatgagggaggggcccaaagcccttgtgggcggacctcccctgagcctgtctgaggggccagcccttagtgcattcaggctaaggcccctgggcagggatgccacccctgctccttcggaggacgtgccctcacccctcactggtccactggcttgagactcaccccgtctgcccagtaaaagcctttctgcagcaaaaaaaaaaaaaaaaaaaaaa

SEQ ID NO: 2439 - DNA, 685 bp, Homo sapiens
  misc_feature (526)..(526): n equals a,t,g, or c
  misc_feature (665)..(665): n equals a,t,g, or c
  misc_feature (667)..(667): n equals a,t,g, or c
aggggaattctgcctagaagctggatgagctgttgaggatcctgtggctgagttggagccatctctcttgctctgctcaggtatggatgtgtttgtgcctctgtcagcctttgactttgacattttgtgtgtttcatcctgccaggctccttcatacgagtgtgggtagggaactcctctgtgctgttttcttagtttttttagtgcacccaggggcctgtgaggatgggccacagatagctgtctgcttgtgtctaatgacattgcgtgtttgccatttgggaaaccagaatggcatggcctcagtcacggccatgactggttgggtgacttgtgtgctctgaatgcctcacacatgagtgtgattggctgcactccggcctgtgcagcagagcgggactcggcctcaaaaaaaaagagaaacagaggcagaaagtagaacagtggtttcargargggagaatggagagttccttaatgaacaratttgttgtgcaagatgaaaaaatttagagatgggtggttntratggttgcacascaatatgaacrtacctaatgccactaaacggtgtactttgaaatgattaaaatggtaaattgttcgtatawttttccacagcaaaaaaaaaaaaaaaaacccaatacgtcccccttgtcaacgtngncaactaatgaagcctgaa

SEQ ID NO: 2440 - DNA, 1756 bp, Homo sapiens
  misc_feature (13)..(13): n equals a,t,g, or c
  misc_feature (26)..(26): n equals a,t,g, or c
  misc_feature (33)..(33): n equals a,t,g, or c
  misc_feature (37)..(37): n equals a,t,g, or c
  misc_feature (52)..(52): n equals a,t,g, or c
  misc_feature (1714)..(1714): n equals a,t,g, or c
  misc_feature (1742)..(1742): n equals a,t,g, or c
tgtaagtacgacntcacgtagtaggngaaagcntggntacgccgtgctaggntacctggctcsggaattcccgggtcgacccacgcgtccggtggccagggatcaggcagcggctcaggcgaccctgagtgtgcccccaccccgccatggcccggctgctgcaggcgtcctgcctgctttccctgctcctggccggcttcgtctcgcagagccggggacaagagaagtcgaagatggactgccatggtggcataagtggcaccatttacgagtacggagccctcaccattgatggggaggagtacatccccttcaagcagtatgctggcaaatacgtcctctttgtcaacgtggccagctactgaggcctgacgggccagtacattgaactgaatgcactacaggaagagcttgcaccattcggtctggtcattctgggctttccctgcaaccaatttggaaaacaggaaccaggagagaactcagagatccttcctaccctcaagtatgtccgaccaggtggaggctttgtccctaatttccagctctttgagaaaggggatgtcaatggagagaaagagcagaaattctacactttcctaaagaactcctgtcctcccacctcggagctcctgggtacatctgaccgcctcttctgggaacccatgaaggttcacgacatccgctggaactttgagaagttcctggtggggccagatggtatacccatcatgcgctggcaccaccggaccacggtcagcaacgtcaagatggacatcctgtcctacatgaggcggcaggcagccctgggggtcaagaggaagtaactgaaggccgtctcatcccatgtccaccatgtaggggagggactttgttcaggaagaaatccgtgtctccaaccacactatctacccatcacagacccctttcctatcactcaaggccccagcctggcacaaatggatgcatacagttctgtgtactgccaggcatgtgggtgtgggtgcatgtgggtgtttacacacatgcctacaggtatgcgtgattgtgtgtgtgtgcatgggtgtacagccacgtgtctacctatgtgtctttctgggaatgtgtaccatctgtgtgcctgcagctgtgtagtgctggacagtgacaaccctttctctccagttctccactccaatgataatagttcacttacacctaaacccaaaggaaaaaccagctctaggtccaattgttctgctctaactgatacctcaaccttggggccagcatctcccactgcctccaaatattagtaactatgactgacgtccccagaagtttctgggtctaccacactccccaaccccccactcctacttcctgaagggccctcccaaggctacatccccaccccacagttctccctgagagagatcaacctccctgagatcaaccaaggcagatgtgacagcaagggccacggaccccatggcaggggtggcgtcttcatgagggaggggcccaaagcccttgtgggcggacctcccctgagcctgtctgaggggccagcccttagtgcattcaggctaaggcccctgggcagggatgccacccctgstccttcggaggacgtgccctcacccctcactggtccactggcttgagactcaccccgtctgcccagtaaaagcctttctgcagcaaaaaaaaaaaaaaaaaaaaaagggggggncccgtacccatttsgccctaaaaggggnccgtattaaaatta

SEQ ID NO: 2441 - DNA, 789 bp, Homo sapiens
  misc_feature (29)..(29): n equals a,t,g, or c
  misc_feature (763)..(763): n equals a,t,g, or c
  misc_feature (784)..(785): n equals a,t,g, or c
agccgtttagaactagtggatccccgggntgcagaattcccgaggactgctgaccttsgggtacctggtgctgctgtcccacgttggcgagcgcatggctgtggacatgcggagggccctcttcagctccctgctccgacaagacatcaccttctttgacgccaataagacagggcagctggtgagccgcttgacaactgacgtgcaggagtttaagtcatccttcaagcttgtcatctcccaggggctgcgaagctgcacccaggtggcaggctgcctggtgtccctgtccatgctgtcgacacgcctcacgctgctgctgatggtggccacaccagccctgatgggagtgggcaccctgatgggctcaggcctccgaaaattgtctcgccagtgtcaggagcagatcgccagggcaatgggcgtagcagacgaggccctgggcaatgtgcggactgtgcgagccttcgccatggagcaacgggaagaggagcgctatggggcagagctggaagcctgccgctgccgggcagaggagctgggccgcggcatcgccttgttccaagggctttccaacatcgccttcaactgcatggtcttgggtaccctatttattgggggctcccttgtggccggacagcagctgacagggggagacctcatgtccttcctggtggcctcccagacagtgcaaagcttcctccgtgttgmaccctgtccgaattcccttccgctgcaggctgtgacactccatgsatgaagnaccaaacttgggaggagccanncatc

SEQ ID NO: 2442 - DNA, 3620 bp, Homo sapiens
  misc_feature (5)..(5): n equals a,t,g, or c
cagtnaccggtccggaattcccgggtcgacccacgcgtcgcacggggaaaaggtggctctggccggggtggctcggtttcctggggctatgtaactgagctcgtcgacttaggggtccttcttcgctgccctcgccgcgtgctagcagggagtttccgctcgggagagagactgtcctcacgcccgctgcgcctcctcgacggcagagcaggcttgctcgcccgtgggagcgtcccggccgagaagccctgaggggggaggggaggccattttgtcccgaccgactccccggaaccgggcggagcggctgggagaggctgcggagccgcggtcgccgccctcggaggcactggacgccgccactgtcggggcttcctcaaagctgttcgtaggtcgcccgcgccgtctcgagcctttttcccacgcttccccggtcctccggcctgagaacgcccgagtgaggagttggccgtagtgagagggaccgatcccttggggccgccggcggcgagagcccgagccgctcctcccaatggcgaagaagacgtacgacctgcttttcaagctgctcctgatcggggattccggagtggggaagacctgcgtcctttttcgtttttcggatgatgccttcaatactacctttatttccaccataggaatagacttcaagatcaaaacagttgaattacaaggaaagaagatcaagctacagatatgggatacagcaggccaggagcgatttcacaccatcacaacctcctactacagaggcgcaatgggtatcatgctagtatatgacatcaccaatggtaaaagttttgaaaacatcagcaaatggcttagaaacatagatgagcatgccaatgaagatgtggaaagaatgttactaggaaacaagtgtgatatggacgacaaaagagttgtacctaaaggaaaaggagaacagattgcaagggagcatggtattaggttttttgagactagtgcaaaagcaaatataaacatcgaaaaggcgttcctcacgttagctgaagatatccttcgaaagacccctgtaaaagagcccaacagtgaaaatgtagatatcagcagtggaggaggcgtgacaggctggaagagcaaatgctgctgagcattctcctgttccatcagttgccatccactaccccgttttctcttcttgctgcaaaataaaccactctgtccatttttaactctaaacagatatttttgtttctcatcttaactatccaagccacctattttatttgttctttcatctgtgactgcttgctgactttatcataattttcttcaaacaaaaaaatgtatagaaaaatcatgtctgtgacttcatttttaaatgtacttgctcagctcaactgcatttcagttgtattatagtccagttcttatcaacattaaaacctatagcaatcatttcaaatctattctgcaaattgtataagaataaagttagaattaacaattttattttgtacaacagtggaattttctgtcatggataatgtgcttgagtccctataatctatagacatgtgatagcaaaagaaacaaacaaaagccaggaaaacactcattttcgccttgaatatgtaaatgggattaattttgtcctgtgccttatgtggaaaggaacttctttggttttccttttttgttctggtggaagcatgtgcaggagacatatcatccaaacataaaccattaaaatgtttgtggtttgcttggctgtaattttcaaagtagttaattgaggacaaagggtaatgcagaagtgatagctttggtttgctgagtcttgttttaagtggccttgatatttaaaactattcctgccaccatttcttctccttggccacttcttccttgcgtctccctgcatgctgctttatttgcttctccctccccaaccacctcatggtatatttaagagtgaaagggacaaactagtaggtttgtcaagtttaatataaagcactgatgtaacttgctaggtaaacggaaagataagttctaactgcctactatccaatgtcagttaattggtgtcttcccccctcatttgctctcttccctaaaatgtgtcccagatgccttcatttgctgttttacttctatgttctgcttttcctcctctctttgttcccttcctgtctatccattgagtttatgaaatggaagagttaactgcatgcactagtgtttggagggtgttgtggtttgtctttctaattaggtgtatagcctattcactttcctagaataaatctcttaacctaaatttgagtagtctgcattttggcaactcctctagcagcttggtagcctagtacaggttgtttttttaaaaaaggaaaagcaggaaggaggagtgaattttattaacatgtttgccaaatgtattgagatttggcctctgaagaacactttttcagtgttaagtttctttaccttaagattcagaaatactttagaatattattaattttaagtcctgtctttacatccttttggaaaacttgtattaccatgagtttggaaaaaggacaacgaaaggcttttcatgtaaagataagatctttagctatctctaaccctgtccttttttcactgcattttttctagttttgcttcattgcttatcattaggatagggtaagtgaagtttgctatgctgctagcatcctaagatgatacctttgttgaaagaattgtgaatagcatgattcatttctagcagaggctgagtttaggacagcagcttccattgagaagtctttctgtgtcgtgaatagcattttaatgacctcttggctcacataagcaaacaacatagggacgtatctgctatgaaaatccacaaatttttcagatagtgccctaaaaacaattttatatgcctcactggttgttattcttaggttattcccacacttgactttatcattgtttactactagtaaaaagcagcattgccaaataatccctaattttccactaaaaatataatgaaatgatgttaagctttttgaaaagtttaggttaaacctactgttgttagattaatgtatttgttgcttccctttatctggaatgtggcattagcttttttattttaaccctctttaattcttattcaattccatgacttaaggttggagagctaaacactgggatttttggataacagactgacagttttgcataattataatcggcattgtacatagaaaggatatggctaccttttgttaaatctgcactttctaaatatcaaaaaagggaaatgaagtataaatcaatttttgtataatctgtttgaaacatgagttttatttgcttaatattagggctttgccccttttctgtaagtctcttgggatcctgtgtagaagctgttctcattaaacaccaaacagttaagtccattctctggtactagctacaaattcggtttcatattctacttaacaatttaaataaactgaaatatttctagatggtctacttctgttcatataaaaacaaaacttgatttccaaaaaaaaaaaaaaaaaaaactcgagggggggcccgggacccaattcgcccta

SEQ ID NO: 2443 - DNA, 960 bp, Homo sapiens
  misc_feature (749)..(749): n equals a,t,g, or c
  misc_feature (838)..(838): n equals a,t,g, or c
  misc_feature (915)..(915): n equals a,t,g, or c
  misc_feature (946)..(946): n equals a,t,g, or c
  misc_feature (953)..(953): n equals a,t,g, or c
attttctgtcatggataatgtgcttgagtccctataatctatagacatgtgatagcaaaagaaacaaacaaaagccaggaaaacactcattttcgccttgaatatgtaaatgggattaattttgtcctgtgccttatgtggaaaggaacttctttggttttccttttttgttctggtggaagcatgtgcaggagacatatcatccaaacataaaccattaaaatgtttgtggtttgcttggctgtaattttcaaagtagttaattgaggacaaagggtaatgcagaagtgatagctttggtttgctgagtcttgttttaagtggccttgatatttaaaactattcctgccaccatttcttctccttggccacttcttccttgcgtctccctgcatgctgctttatttgcttctccctccccaaccacctcatggtatatttaagagtgaaagggacaaactagtaggtttgtcaagtttaatataaagcactgatgtaacttgctaggtaaacggaaagataagttctaactgcctactatccaatgtcagttaattggtgtcttcccccctcatttgctctcttccctaaaatgtgtcccagatgccttcatttgctgttttacttctatgttctgcttttcctcctctctttgttcccttcctgtctatccattgagtttatgaaatggaagagttaactgcatgcactagtgtttggaaggtgttgtgggtttgtcttcctaaatnaagggtatagcctaatccacttcctagaataaatctcttaacctaaattgagtaatctgccattttggcaactccctagcagttggtanctagtacaggtgtttttaaaaaggaaaagcagaagagggtgaatttataacatgttgccaatgatgagattggcccngagacacttttcagggtaagttcttacctangtcaggnaacttag

SEQ ID NO: 2444 - DNA, 2081 bp, Homo sapiens
ggcacgagattttctgtcatggataatgtgcttgagtccctataatctatagacatgtgatagcaaaagaaacaaacaaaagccaggaaaacactcattttcgccttgaatatgtaaatgggattaattttgtcctgtgccttatgtggaaaggaacttctttggttttccttttttgttctggtggaagcatgtgcaggagacatatcatccaaacataaaccattaaaatgtttgtggtttgcttggctgtaattttcaaagtagttaattgaggacaaagggtaatgcagaagtgatagctttggtttgctgagtcttgttttaagtggccttgatatttaaaactattcctgccaccatttcttctccttggccacttcttccttgcgtctccctgcatgctgctttatttgcttctccctccccaaccacctcatggtatatttaagagtgaaagggacaaactagtaggtttgtcaagtttaatataaagcactgatgtaacttgctaggtaaacggaaagataagttctaactgcctactatccaatgtcagttaattggtgtcttcccccctcatttgctctcttccctaaaatgtgtcccagatgccttcatttgctgttttacttctatgttctgcttttcctcctctctttgttcccttcctgtctatccattgagtttatgaaatggaagagttaactgcatgcactagtgtttggagggtgttgtggtttgtctttctaattaggtgtatagcctattcactttcctagaataaatctcttaacctaaatttgagtagtctgcattttggcaactcctctagcagcttggtagcctagtacaggttgtttttttaaaaaaggaaaagcaggaaggaggagtgaattttattaacatgtttgccaaatgtattgagatttggcctctgaagaacactttttcagtgttaagtttctttaccttaagattcagaaatactttagaatattattaattttaagtcctgtctttacatccttttggaaaacttgtattaccatgagtttggaaaaaggacaacgaaaggcttttcatgtaaagataagatctttagctatctctaaccctgtccttttttcactgcattttttctagttttgcttcattgcttatcattaggatagggtaagtgaagtttgctatgctgctagcatcctaagatgatacctttgttgaaagaattgtgaatagcatgattcatttctagcagaggctgagtttaggacagcagcttccattgagaagtctttctgtgtcgtgaatagcattttaatgacctcttggctcacataagcaaacaacatagggacgtatctgctatgaaaatccacaaatttttcagatagtgccctaaaaacaattttatatgcctcactggttgttattcttaggttattcccacacttgactttatcattgtttactactagtaaaaagcagcattgccaaataatccctaattttccactaaaaatataatgaaatgatgttaagctttttgaaaagtttaggttaaacctactgttgttagattaatgtatttgttgcttccctttatctggaatgtggcattagcttttttattttaaccctctttaattcttattcaattccatgacttaaggttggagagctaaacactgggatttttggataacagactgacagttttgcataattataatcggcattgtacatagaaaggatatggctaccttttgttaaatctgcactttctaaatatcaaaaaagggaaatgaagtataaatcaatttttgtataatctgtttgaaacatgagttttatttgcttaatattagggctttgccccttttctgtaagtctcttgggatcctgtgtagaagctgttctcattaaacaccaaacagttaagtccattctctggtactagctacaaattcggtttcatattctacttaacaatttaaataaactgaaatatttctagatggtctacttctgttcatataaaaacaaaacttgatttccaaaaaaaaaaaaaaaaaaaa

SEQ ID NO: 2445 - DNA, 474 bp, Homo sapiens
ggcagccatcctggagcgccgggccgccatgtgcgcctgttgctgctggtggcctttgccctggtggtcgtcctgttccacgtcctgcttgctcccatmacagccytcttccacacccacttctatgacaggctacaggacgcgggytytcgctggcccgagctctacytctaytcgagggctgacgaagtagtcctggccagagacatagaacgcatggtggaggcacgcctggcacgccgggtcctggcgcgttctgtggatttcgtgtcatctgcacacgtcagccacctccgtgactaccctacttactacacaagcctctgtgtcgacttcatgcgcaactgcgtccgctgctgaggccattgctccatctcacctctgctccagaaataaatgcctgacacctccccacaaaaaaaaaaaaaaaaaaactcgagggggggcccggtacccaattcgccctataaaggt

SEQ ID NO: 2446 - DNA, 1696 bp, Homo sapiens
  misc_feature (821)..(821): n equals a,t,g, or c
ctgaagagttgagtttggccacccagttatatgcagggctagtggtcagcctctctggcctcctgcccctggctttccgaagctgtctggctcgggtgcatgcagggacattacagcctcccttcacggcccggttcctgcgcaacttggcactgctagtagggtgggaacagcagggtggcgagggccctgcagccctaggggcgcactttggggaatctgcctcagcccatctgtctgacctggctcctctcctgctacatcctgaggaggaagtagctgaagctgctgcctctctcctggccatttgtccctttccttctgaagccttatccccctcccagctcctgggactggtaagggctggggtgcaccgcttctttgcctctctgaggctgcatggacccccaggtgtggcctcagcctgtcagcttctcacccgcctgtctcagacatccccagctgggctcaaggctgtcctgcagctgctggttgaaggagccttacatcgaggcaacacagaactgtttggtgggcaagtagatggggacaatgagactctctcagttgtttcagcttctttggcttctgcctccctgttggacactaaccggaggcacactgcagctgtgccaggtcctggagggatttggtcagttttccatgctggagtcatcggccgtggcttaaagccacccaagtttgtccagtcacgaaatcagcaggaagtgatctataacacccagagcctcctcagcctcctggttcactgctgcagtgccccagggggcactgaatgtggggaatgctggggggcaccnatcttgagtccagaggcagccaaagcagtggcagtgaccttggtggaragtgtgtgtcccgatgcagctggtgcagagctggcctggccccccgaggaacacgcccgggccaccgtggagcgggatctccgcattggccggcgcttccgcgaacagcccctgctctttgagctgttaaagctggtagcagctgcacccccagccctgtgctactgttccgtgctgcttcgggggctgctggccgccctcttgggccattgggaagcctctcgccaccctgacacgacccactccccctggcacctggaggcatcctgcaccttagtggctgtcatggctgagggaagcctcctgcctccggccctgggtaatatgcatgaagtatttagccaactggcacctttcgaggtgcgtctgctgctgctcagtgtctggggttttctccgggagcatgggcccttgcctcagaagttcatcttccaatcagagcggggtcgcttcattcgggacttctccagggagggtggaggtgagggtggaccccatctggctgtgctgcacagtgtcctccaccgcaacatcgaccgcctaggtcttttctctggccgtttccaggcaccttcaccgtccactctccttcgacaggggacgtagccttttcttgctctggaagcccagggaggttgagcagtgagagagggaagggactaacgtgctccggaagggtggaggtttctcttctaagtccttggtctaaagagcgctgtcacttttttctctcccacttttttttttctaaataaaatttgccaacttgaraaaaaaaaaaaaaaaaaaaaaaaaaaaaaaaaaaaaaaaaaaactccgaggggggg

SEQ ID NO: 2447 - DNA, 659 bp, Homo sapiens
aggaaataatccagtcccccccaagaaaggaatgaagtgctataatgagaaaaatcctagtacctaacatatagtagacagtggagagtggttctctttcgtttctcaggggcagacagatggggtgctggagtcctctatcaaagagtcagagctctatcccagatgtgtaatgaacgtggtcacagacatattgtcccattaccatttaccttccctataaccactgtgcctccagccttgtagaatagacacataggagcgcagcaatacgtctaaaaataggagtgagagagggcagggcatgcccgttcttgtggtagaagaaaagaatgtcaaagaaagcagctgggactaatgaactttacattagccatattccattatttcagcttaagtcaaatgtcggtcctcatgaggcaactggctttgacaggagctacgctaattaccacttaccaacctttaatttctgggtaaaagcaaaagagaaaaactaatggatttttcattttccagagagacaagaataaaataatagtagtctgtagaaaaaagaaaacctgcatcaattacaagaattattaatgtatctttaataaataaccacattatttagctgtttaatttcctaaaaaaaaaaaaaaaaaaaactcgta

SEQ ID NO: 2448 - DNA, 1371 bp, Homo sapiens
ttttttttttttttttttttaggaaattaaacagctaaataatgtggttatttattaaagatacattaataattcttgtaattgatgcaggttttcttttttctacagactactattattttattcttgtctctctggaaaatgaaaaatccattagtttttctcttttgcttttacccagaaattaaaggttggtaagtggtaattagcgtactcctgtcaaagccagttgcctcatgaggaccgacatttgacttaagctgaaataatggaatatggctaatgtaaagttcattagtcccagctgctttctttgacattcttttcttctaccacaagaacgggcatgccctgccctctctcactcctatttttagacgtattgctgcgctcctatgtgtctattctacaaggctggaggcacagtggttatagggaaggtaaatggtaatgggacaatatgtctgtgaccacgttcattacacatctgggatagagctctgactctttgatagaggactccagcaccccatctgtctgcccctgagaaacgaaagagaaccactctccactgtctactatatgttaggtactaggatttttctcattatagcacttcattcctttcttgggggggactggattatttattttgagacagggcctcactctgccacccaggatggagtgcagtggcacgatcacagctcactgcagcctcgaactcctgggctcaagtgatccttctgccttagcctcccgagtatctaggactacaggcatgtaccaccacacccggctaatttttattttttacatttttgtagagatggggtcttgctatgttccccaggtcggtcagtcggtcatgtggtacttcatttaggccaggcgtggtggctcaccacctatactcccagcactttgggaggccaaggcaggtggatcacttgaggtcaggagtttgagaccagtctagccaacatggtgaaaccctgtgtctactaaaaataccaaaaaaaacttagccgggcgtggtggcgggcacctgcaatcccagctactctggaggctgaggcaagagaatcgcctgaacctgggagatggaggttgcagtgagcagagattgtgccactacactccagcctgggcaacagagcaaagcctcaaacaaaacgaaaacgaaacaaaacaaatatagtacttcatttaaccctttcaagcttggagccttagactaactgagaggttagactcaagccggtttgtctcactcccaaatccacaggacattttccattatccacccagttcagccgcttggtgggcttgcttcaagtacagaatattaacactaacgcccagacgagc

SEQ ID NO: 2449 - DNA, 909 bp, Homo sapiens; identical to SEQ ID NO: 2113

SEQ ID NO: 2450 - DNA, 194 bp, Homo sapiens
  misc_feature (5)..(5): n equals a,t,g, or c
gtgancgaagaaagcggaaagagcgccccaatacgcaaacccgccttctccccgcgcgttggccgattcattaatgcagctggcacgacaggtttcccgactggaaagcgggcagtgagcgcaacgcaattaatgtgagttagctcactcattaggcaccccaggctttacactttatgcttccggctcgtatg

SEQ ID NO: 2451 - DNA, 247 bp, Homo sapiens
  misc_feature (242)..(242): n equals a,t,g, or c
cttcagggttgagatgtgtataagagacagtatttgaggacttggttcttaagatatattcaagaatgctttccctttgcccaaaggtgaaagtatcattaaagttgtcttagtatggtaaggatttttttttctctgcttggcagttaagagttcaacatggggctgggcctgtctcttatacacatctcaaccctgaagcttgcatgcctgcaggtcgactctagaggatcmccggcacngataa

SEQ ID NO: 2452 - DNA, 909 bp, Homo sapiens
gccaccacgcccggcaaacccatacattttaagtgtatacacagacaattccactctctgatcaaggtatacaacattactcttacctcaaagttcccttgttgccagtcaactctgcccttccctccagagtcagagcactattttgatttttttgtaatttagttttcctgaatctagaacttaaggaaacatacagtagatgtgtgtgggggcatgatcttaatataaaawactagatggaagactggaaatacagatcagactattataacaaaataacttggacattatattcctttaaaaaaactttgcccccaatccctaaagaatgttggttcttaaggaagcagtgtttgttctatcagaatcctattatcactccttggacttagttggtaaagtaacagaccttatgaaaaggaacagtcgattgctctgtggatgtggccccatgtatcccactttgatttcccttaaacttttttctcaccacaggaaagtaaaacaggattcaaccctaattagaaaatgtagatattaactgtcattcaaatgtttattagcctctagaattaacttttttttagccagatgcggtgctcacgcctgtaatccagcactttgggaggctgaggtgtgtggatcacttgagatcagagttcaaggccggcctggtgaaaccctctctctgctaaaaatacaaaaattggccaggtgtggtggcgtgcgcctgtggtcccagctactcaggaggctgaggcaggagagttgcctgagcccgggaggcggaggtgcagtgagccgagatcacgccaactgcactccagcctgggtgacagagggagactgtctcaaaaaaaaaaaaaaaaaactcgaggggggcccgtcccaatcccctatagtgag

SEQ ID NO: 2453 - DNA, 2592 bp, Homo sapiens
  misc_feature (12)..(12): n equals a,t,g, or c
  misc_feature (14)..(14): n equals a,t,g, or c
  misc_feature (2585)..(2585): n equals a,t,g, or c
  misc_feature (2588)..(2588): n equals a,t,g, or c
gcgcggccaggntngataccgccgacctcgagaacaacatgttctttcctgcgttatcccctgattctgtggataaccgtattaccgcctttgagtgagctgataccgctcgccgcagccgaacgaccgagcgcagcgagtcagtgagcgaggaagcggaagagcgcccaatacgcaaaccgcctctccccgcgcgttggccgattcattaatgcagctggcacgacaggtttcccgactggaaagcgggcagtgagcgcaacgcaattaatgtgagttagctcactcattaggcaccccaggctttacactttatgcttccggctcgtatgttgtgtggaattgtgagcggataacaatttcacacaggaaacagctatgaccatgattacgccaagctcgaaattaaccctcactaaagggaacaaaagctggagctccaccgcggtggcggccgctctagaactagtggatcccccgggctgcaggaattccggtcgtcggtctgtgcattattggctggttctggtttagcccgacgctgtacgttgattcctggaatccgcatcatgcaccgttcttcagtgcggtaggttcttccatcgctatgacgctgtgggcttttcttggtctggagtctgcgtgtgcgaatactgatgtagtggaaaacccggaacgtaatgtgccaatcgcggtactcggcggtacgttaggtgcggcggtgatttatatcgtctccaccaacgtgattgccgggattgtgccaaatatggagctggcaaattcaacggcaccatttggtctggccttcgcgcagatgttcacgccggaagtgggtaaagtcattatggcgctgatggtgatgtcctgctgcggttcgctacttggctggcagttcaccattgcccaggtgtttaaatcttcatctgatgaaggctacttccctaaaattttctcccgtgtaaccaaagtggatgcaccggtgcagggaatgttgaccattgtgattattcagagtggattggcactgatgaccattagcccgtcgctaaacagtcagttcaacgtgctggttaacctggccgtggtgaccaatatcattccgtatattctgtcaatggcggcattagtcattattcagaaggtcgctaatgtgcccccctcaaaagcgaaagttgcaaactttgttgcttttgttggcgcgatgtatagcttttatgcgctgtactcatccggggaagaagccatgctgtacggttccatcgtgaccttccttggttggacactgtatggtctggtatcaccacgctttgaactgaaaaataaacacggttaataaaacaaagtaaaaaagggcgattgaatgatcgccctttctgtttgttggcaaatagttcgttatttatgccgcatccggcagatgtagggtctaaacgcgatcgaacacagcaactatttgcgtaattatatggggcatctgcgacaaaaactggaacaggatccggcccggcctcgccattttattactgaaaccggtattgggtatcggtttatgctttgaaaaaagtggcaatgtatggataaagtcattttttattcaaatataaggaacttaatatttaaaaaatgttccatacaattcctcatcataaatgacaccgtagcacacaaggagcaagtagcgatgcgtgaaatgaatcagttagtaaatactgaagattcagcctggccaataatccagaactggttaaaagacgccacaaaccataccgaactcttaccggttaataaagatttagccgaaaccgcactttatcaattacaggtgacaacaaaatcaccgatgggtgcgcttgtctatggctccggaggtctgctgattgataatggttagttacgcatagcaggatctggtcacccccggttgccacgagatccagtaagttggacacaacgccctgaattcgcaggcgtgcgggctttacccatcgctgacgatgtcgcaggggtaatttttgctcttaatggtggcgatcttggggaagatactggctgcgtttattattttgcgccagatacgctgaattgggaaagtctggaagttggatattctgagtttcttcagtgggcattatccggtgatttagataccttctatgaaaatgtacgatggcagcaatggcgagaagacgtaataaaattatcggcaacggaagccttcacgttctaccctttcttatgggtacaaagtgaagaagcaagaacaagaaaagttatttcgcttactgaactctgggaaatgcagtatcaaatgaaagaaacattcacgcaataagacatgttcaggtccgggtttcattcccggactcactattttaatgtgtatttatcgctttcaattcttgctggcaattttctgactggcagcgtcgtaactcaataatcccgacatgcatcatcgagccaaaaaatccgctttcgctgacataatcctcattgactatcggtcgagtgccgggcttgccctggcaaacccgcataaaaaatgaggtgtagctgttctcgaggtcggcggtatcgaagcnggncgcg

SEQ ID NO: 2454 - DNA, 1829 bp, Homo sapiens
  misc_feature (355)..(355): n equals a,t,g, or c
  misc_feature (1496)..(1496): n equals a,t,g, or c
aaaatttggttaggccccagatcgcggtactcggcggtacgttaggtgcggcggtgatttatatcgtctccaccaacgtgattgccgggattgtgccaaatatggagctggcaaattgaacggcaccatttggtctggccttcgcgcagatgttcacgccggaagtgggtaaagtcattatggcgctgatggtgatgtcctgctgcggttcgctacttggctggcagttcaccattgcccaggtgtttaaatcttcatctgatgaaggctacttccctaaaattttctcccgtgtaaccaaagtggatgcaccggtgcagggaatgttgaccattgtgattattcagagtggatnggcactgatgaccattagcccgtcgctaaacagtcagttcaacgtgctggttaacctggccgtggcttccagcgtttcttcaaggcggttgaaccgaaatgggatctgaaaacggaytggcaaatcatcagtgaaatcgccacccgtatgggttatccgatgcactacaacaacacccaggagatctgggatgagttgcgtcatctgtgcccggatttctacggtgcgacttacgagaaaatgggcgaactgggcttcattcagtggccttgccgcgatacttcagatgccgatcaggggacttcttatctgtttaaagagaagtttgataccccgaacggtctggcgcagttcttcacctgcgactgggtagcgccaatcgacaaactcaccgacgagtacccgatggtactgtcaacggtgcgtgaagttggtcactactcttgccgttcgatgaccggtaactgtgcggyactggcggcgctggctgatgaacctggctacgcacaaatcaataccgaagacgccaaacgtctgggtattgaagatgaggcattggtttgggtgcactcgcgtaaaggcaaaattatcacccgkgcgcaggtcagcgatcgtccgaacaaaggggcgatttacatgacctaccagtggtggattggtgcctgtaacgagctggttaccgaaaacttaagcccgattacgaaaacgccggagtacaaatactgcgccgttcgcgtcgagccgatcgccgatcagcgcgccgccgagcagtacgtgattgacgagtacaacaagttgaaaactcgcctgcgcgaagcggcactggcgtaataccgtcctttctacagcctcctttcggaggctgtttttttatccattcgaactctttatactggttactccctacccaatcgtattatcaaaatgaaaaaaattatcgcattgatgttgtttttgacattctttgcccacgccaacgactccgagcctggcagccagtatttaaaggcagcagaggccggggaccgacgcgcacaatattttcttgccgacagctggtttagctccggcgatttgagcaaagccgaatattgggcacagaaagccgccgacagcggtgatgctgatgcctgcgcgctgntggcgcagatcaaaatcaccaatccggtcagtctggactatccacaagcaaaagttcttgcagagaaagcggcgcaagcgggcagtaaagaaggtgaagtaacgctggcgcatattctggtaaatactcaagcgggtaaaccggattatccaaaggcaatttcgctgttagaaaacgcctcggaagatctggagaacgactctgccgtcgatgcccaaatgctgcttggtttgatttacgccaacggcgtgggcattaaggccgacgatgacaaggcaacctggtatttcaaacgcagctctgcaatttcccgaaccggttattccgagtact

SEQ ID NO: 2455 - DNA, 1574 bp, Homo sapiens
  misc_feature (41)..(41): n equals a,t,g, or c
  misc_feature (1488)..(1488): n equals a,t,g, or c
  misc_feature (1565)..(1565): n equals a,t,g, or c
ataacttcacattgtgttggaagatttgtcatcagtgaggnaaacatctgcttaaattacaggaatttttgtattatacagctctgaaaattctgccatttccttattaactagcagckttagtttgtagtttatgaaatcttgaggggctcktttactgggryttcttatttttwtgttttttcccgcttaatttggtgggaggtcaaattgaatataacccaataaaggcttcttaatgacaaaattggcatgtttgcatgatgaaatggaaatgaacagtattgcaatgtccggtatacaaaataacattaattcaatgtagataaaattacactagtttaaaatatgtgcattcacttgtatttgttagtgttttagtcttttttgaaagatgtgctctgttaatgttgctttttttttttttttttaawacatgctagtctaacatttcytgctctatgcctgcatctttaacaatggscaaagtgaagaaaatgctaccttttttgttaacaagacactgacttgaaacatgtacatttaaagccttttattttttccctttttgttttggtagttgggcatttaaataaggacaaggaaaaatatttttgggggcaaatcaagagcctatgagttctaagtataaagctgaagtgatttcgaatgccagcgttatatatttgcatttttcacattttacgagggagtatatgtgtatgtgtgtgcacgcatgcatgtgtatgtgttttgctttttgtttccatcaactaatcaaaaaggataatttagaaaatggagcatgatgggaaacagagtttttgactttaaaaaacagatgagttgttttcataagtagactccactggggtagaggtattcaccttaaaacatagggtgagtagatgcttttttaggcctttttgtgtatatgtacgttgtttgtttttttccttttgtttctagcctgttcagtgtacagtttattcaaggctacatgcttttctttaatgcttctggctatgcattttctctttttacatataggatttgggattgggggtgggttggatgtttttgtttggggacttatttagtagtattgagtctcttatagccctactcttaagccttcaatactgtccactctttatattcctttacttgcagaatttataaaagcccccaaactgcatataatatgagcctttaaaacatgggtaaaactaatcccattgatgggtttggatggtatgttaagaaatggagatgctgcagagcccaacgtaattttttaaacagcaagttttccatctccctacgaatcctctgaagcttttacccaagccctttcttgcctctccagtgctattttccttcagatggaccttaaacataatttcttggacactactagagagacttcgaggcaataataaaagatcagtattaaccagcwawaacagagaaaactaccctggaacntagaaaaacccaacaagagacttgggcattcatcaagcacattatcagactttggggaacatattgaaggcattgantttgaaaat

SEQ ID NO: 2456 - DNA, 978 bp, Homo sapiens
  misc_feature (909)..(909): n equals a,t,g, or c
  misc_feature (915)..(915): n equals a,t,g, or c
  misc_feature (957)..(957): n equals a,t,g, or c
  misc_feature (970)..(970): n equals a,t,g, or c
tttacgatcatatacggcgatttgggtacgggcccccctcgagtttttttwttttttttttaccctgaamcagggtcttgctgctgttgcccaggttggaatgcagtggaacaatcatagcatactacagtcttgaactcccgggctcaagcgatcctcctgtatcagcctcccaagtagttgggtctacaggtgcaccactatgccaggcttcctctttgtcctttaaaaccttctcccatccaaagtgcagcccacattccctgtcctctaaaaattttccagggccttctaggccacagtggtccatctttcttctttaaacttggcactcattgtactgttgcttggccctaaaatatactgaggattattctggatgtcatttggctttttaaaacattgtctttgcctccaactgaatattaattacatgcaggtatgtgccacgtatctaagcattgagacttcacctaccttatttctctaggtagaaacctatcattatagtcctcatcagattatatgcaagtagatgcttgacatttgcaatttgactgttttcaaataagttggaagtttatctgagactcttgatttcaattgcgtgtgtaaaagaagtcagctaggggctgagagcccggctaatcaatttaaatgtggctttatttgttcattgttggtctatgttgtattaatttttgttaaatgactaaaatttggtttgaaaggtccatgaaaataacacatctggggcagaaaatcattttgggcaagaaattaaattttgtaatttagggtggaaaactgagcctcacagtgagatttatgtgccgggccctctgtacaaagatatgatgtgtcatgtgctctgttmagtgctctagcagtgtaaaagtcactgaagtnagaaantcgtttgaaaaggtttagctatatggtggttcactactgatntggggcacggaanacaatcta

SEQ ID NO: 2457 - DNA, 1607 bp, Homo sapiens
  misc_feature (570)..(570): n equals a,t,g, or c
  misc_feature (628)..(628): n equals a,t,g, or c
  misc_feature (689)..(689): n equals a,t,g, or c
  misc_feature (1602)..(1602): n equals a,t,g, or c
ggcacgagtgaggctcatgtctgacctgcagaactgtataatgataaattatgttgtttgaaaccgctacatttgcggtaatttgttacagcagcaatagaaaacgaatcccctgcccagaatgacttcctcctttcctgtcggacgaaggctcaggccttctgctgaaagcttgctcccctaagtagtcacacccaatgccgaatactccccagaagcagctgctattttctgaggacaatgagttgcttgtaagcctgagaacaggacgaaaacccactttgcaagcagccctgcgtgtgacgggcatgccctcggagggcaggttggttttgctatctgctttctgtcctgcctttttccccccatgggtcctgtctggctcttttgctttctcactttgtgcagaaagccatctcaactcttctcacaggagaatagctgtatggacgtagcagggggagttaccacatgcctacctccatggttttcgagaggggcccctgcccaaatgtctcagtggccaccttcatcagaccatggagcagtcagagcgggaagggattctanagttggtccagtccaaccatctcatcttacatgtgaaggaggaaaggaagaaaggganaaaaataagaaagctgaggtcaaccctcctacagggatgggcctggccaacaggatcccangggatgacataacattgaaattaagaaaccaaggaaagttgagaactaaagaaaacagaacccagtcagccaagaggcatccttgagggccaaccaagccgtcaaacctggatgcccccgacgagtcagaaagtcgggtgcctcaagagccaagcagccaagaaatggggtctggaactggcactttggtccgcctctgtgcactcacccagaaagggtggaagggaccctgggaccaagtgccaaggtcacacaacggatgaatagactgctggacttcaaactgaacatgccattttgccaaagcagtcatcaccttccgtgaatcataaatgtttgttcaaagccacaaatgtatatactctttgtatgtatacagattttttctaaaggttaacatctaaacagatcaattaaggtcagccttaatttgtctgagctttttggttaaagtttcctgagtaattgagcgaattcaagtttctggctttctcctttctctttctccatttaaaacatkatctcatgaaatttctgtcccaagaaaggcaggattacatctttttttttttttttagcagtttgagttggtgtagtgtattcttggttatcagaatactcatatagctttgggattttgaattggtaaatattcatgatgtgtgaaaaatcatgatacatactgtacagtctcagtcccataaaattggatgttgtgcctacacacaggatctagaagaatatgtcaaactataaactgcttgtgattgtgaatgactttgttctttgcttgtgtttttcaatttcctataatgcacatactaacttttaaaaaataaaggttattttaaaagccwraaaaaaaaaaaaaaaaaaaaaaaaaaaaagggggggcccccccattggggcccancctta

SEQ ID NO: 2458 - DNA, 972 bp, Homo sapiens
  misc_feature (5)..(5): n equals a,t,g, or c
  misc_feature (9)..(9): n equals a,t,g, or c
  misc_feature (28)..(28): n equals a,t,g, or c
gcctnctgntcgtctggccagtttcacnttcggacagaatatattttgaattagttttatgaactctgttaaaattctgacccattacttgccaatttataaaagcctattttattacaaggcattgtctctggaaaaaaaaaattcccttaattcttaaatgtcattagatgtagaaagaaaaactaaatgttactaaggattattaagaaatagttttttaactattaagattttaaaaactttcctgtaaagttgcttttaataagtatcaaattttctgtatgatcatgtaaaattcataatttgtgcaaagcagaggaaaaataaattcttaattttgtttagacttaacctaaaatgacatttataagttttaaatatgcagattttagagttacatattgtacaatgttgataggtttttctagtttktatttttcatctgaatggagactttatttgggaaagtgttttaattgttaaaactgatatttagtttgagaatgactttgtttacttttgtttagactactaaaatgtgacttacatgttttgattggactagtctgcaattttctcatcatagcatgagttggcagagaatatctacttccagcagtacatttaaagtttggtttataggaattaatttgagaatcaaaatgtaggaattttaaaataatttgctcactaaaaaaattaagatgttaaataatgggttattctttgtacttatctctgtcagaaactcttgctttactctttgttctcccagcagtttttggtttaatttctaatgtgtctaatttgtgtaggcgtcgaccagaagattatgatattcataacagcagaaagaaaccaaggattgactatccccctgagtttcaccagagaccaggttaatattttataatcctgcagatatttgatttcaaattattggaaaaaaaaaaaaaaaaaaactcgtag

SEQ ID NO: 2459 - DNA, 951 bp, Homo sapiens
gctcgtgccgactcgtgccgaattcggcacgagaatacaatatatacaagtgaagtttttacctcagttttgcaatggactgcaaactatacttattacaccactacaccttctctcaagcctgccagggcctccatttatgtatgtggcttacagcttaaagtcagtagttggactactatatgaactgttactatcatgttttataccggtcgtaaatgcactccccaaactacaggaaagcggtatgtttattttttaaaccagcttttaattttcttagtattatttattgtagatgcaactgtttttattctgttggggggcttgggattattgcacttaactttgcagtttgagtgaactgtgttgaaaaagttaatgaaagcagttggtactcagacaaatagctgaaaactagtgaatgctaggttgttatcaagtttttatttgacattaaggttaaaaagatatatttattttctaaatattttggactttttttttgtttaactctttattagctgctaagtaaattgaagtgtatttaatgatgtgttaagttaacccgatttatggaagacagtaaagaacagccctctgtagtcagtaaagtttcaccttctaaagaatatattttgaattagttttatgaactctgttaaaattctgacccattacttgccaatttataaaagcctattttattacaaggcattgtctctggaaaaaaaaaattcccttaattcttaaatgtcattagatgtagaaagaaaaactaaatgttactaaggattattaagaaatagttttttaactattaagattttaaaaactttcctgtaaagttgcttttaataagtatcaaattttctgtatgatcatgtaaaattcataatttgtgcaaagcagaggaaaaataaattcttaattttgtttagacttaaaaaa

SEQ ID NO: 2460 - DNA, 1699 bp, Homo sapiens
  misc_feature (1668)..(1668): n equals a,t,g, or c
cattaatgggaacaaaagctggagctccaccgcggtggcggccgctctagaactagtggatcccccgggctgcaggaattcggcacgagtgaggctcatgtctgacctgcagaactgtataatgataaattatgttgtttgaaaccgctacatttgcggtaatttgttacagcagcaatagaaaacgaatcccctgcccagaatgacttcctcctttcctgtcggacgaaggctcaggccttctgctgaaagcttgctcccctaagtagtcacacccaatgccgaatactccccagaagcagctgctattttctgaggacaatgagttgcttgtaagcctgagaacaggacgaaaacccactttgcaagcagccctgcgtgtgacgggcatgccctcggagggcaggttggttttgctatctgctttctgtcctgcctttttccccccatgggtcctgtctggctcttttgctttctcactttgtgcagaaagccatctcaactcttctcacaggagaatagctgtatggacgtagcagggggagttaccacatgcctacctccatggttttcgagaggggcccctgcccaaatgtctcagtggccaccttcatcagaccatggagcagtcagagcgggaagggattctagagttggtccagtccaaccatctcatcttacatgtgaaggaggaaaggaagaaagggagaaaaataagaaagctgaggtcaaccctcctacagggatgggcctggccaacaggatcccaagggatgacataacattgaaattaagaaaccaaggaaagttgagaactaaagaaaacagaacccagtcagccaagaggcatccttgagggccaaccaagccgtcaaacctggatgcccccgacgagtcagaaagtcgggtgcctcaagagccaagcagccaagaaatggggtctggaactggcactttggtccgcctctgtgcactcacccagaaagggtggaagggaccctgggaccaagtgccaaggtcacacaacggatgaatagactgctggacttcaaactgaaccatgccattttgccaaagcagtcatcaccttccgtgaatcataaatgtttgttcaaagccacaaatgtatatactctttgtatgtatacagattttttctaaaggttaacatctaaacagatcaattaaggtcagccttaatttgtctgagctttttggttaaagtttcctgagtaattgagcgaattcaagtttctggctttctcctttctcttttctccatttaaaacatgatctcatgaaatttttgtcccaagaaaggcaggattacattttcttttaacagtttgagttggtgtagtgtattcttggttatcagaatactcatatagctttgggattttgaattggtaaatattcatgatgtgtgaaaaatcatgatacatactgtacaatctcagtgccacaaaattggatgttgtgcctacacacgcacaggacctagaagagcatgtcaaactataaactgcctgtgattgtgaatgactttgttctttgcttcttgcgtttttcagtttcctataatgcacatcttaacttttaaaaaataaaggttattttaaaagccaaaaaaaaaaaaaaaaactcgtagggggggctccggtaccnaattgcgcgcctgatgagtgtgtgcgtatac

SEQ ID NO: 2461 - DNA, 547 bp, Homo sapiens
ccacgcgtccgtaaaacccgaaagatggagcctcaggttcgcgctctgcgttgcgggtgctggaaccgagattcaaaaagagcttccggaggttccatacaagtaaatccgaaaaaaagtgtgtgtgggggggtccacaccactaattattatggcgaggaagataaagaagacatggacagaaggcggatggctctgcggcctggctcccgcagaccgaccgccttcttcttccattcgagatggctcgtaccgaacctccttgccttcttcctgggtctctcgggggctggaccaatacatctgccgatgccctggccgaatggcaggcgacatcgggtcctggacccccacacgcagctcagtacccacgaggccccaggccgctggaagcctgtagctccgcggaggatgaaagcctgcccgcaggttctcctggagtggtgagcctctgtcggaagggggcgcccacgtctttttaatggtcctaacacaccagtggaataaatctytaagattccaaaaaaaaaaaaaaaaaaaaaaaaaa

SEQ ID NO: 2462 - DNA, 515 bp, Homo sapiens
aatttcaaaaacaacgaaaccttcttttgccccctccgcagcagtcgcctccgggctttattgcaagtttacggttccatacaagtaaatccgaaaaaaagtgtgtgtgggggggtccacaccactaattattatggcgaggaagataaagaagacatggacagaaggcggatggctctgcggcctggctcccgcagaccgaccgccttcttcttccattcgagatggctcgtaccgaacctccttgccttcttcctgggtctctcgggggctggaccaatacatctgccgatgccctggccgaatggcaggcgacatcgggtcctggacccccacacgcagctcagtacccacgaggccccaggccgctggaagcctgtagctccgcggaggatgaaagcctgcccgcaggttctcctggagtggtgagcctctgtcggaagggggcgcccacgtctttttaatggtcctaacacaccagtggaataaatctctaagattccacaaaaaaaaaa

SEQ ID NO: 2463 - DNA, 692 bp, Homo sapiens
  misc_feature (593)..(593): n equals a,t,g, or c
cctgctggtgggagaggactcaggctaaggtggcccccactgaagactcctgctaagcaacccactgaagacccctccgaatcatcgacggggcgtccttggggtgcagcccaggaagctcagttcacagccttggggcgcgcggcccatggagtcggggctgctgcggccggcgccggtgagcgaggtcatcgtcctgcattacaactacaccggcaagctccgcggtgcgcgctaccagccgggtgccggcctgcgcgccgacgccgtggtgtgcctggcggtgtgcgccttcatcgtgctagagaatctagccgtgttgttggtgctcggacgccacccgcgcttccacgctcccatgttcctgctcctgggcagcctcacgttgtcggatctgctggcaggcgccgcctacgccgccaacatcctactgtcggggccgctcacgctgaaactgtcccccgcgctctggttcgcacgggagggaggcgtcttcgtggcactcactgcgtccgtgctgagcctcctggccatcgcgctggagcgcagcctcaccatggcgcgcagggggcccgcgcccgtctccagtcggnggcgcacgctggcgatggcagccgcggcctggggcgtgtcgctgctcctcgggctcctgccagcgctgggctggaattgcctgggtcgcctggacgctt

SEQ ID NO: 2464 - DNA, 1916 bp, Homo sapiens
cgtgttgttggtgctcggacgccacccgcgcttcccgctcccatgttcctgctcctgggcagcctcacgttgtcggatctgctggcaggcgccgcctacgccgccaacatcctactgtcggggccgctcacgctgaaactgtcccccgcgctctggttcgcacgggagggaggcgtcttcgtggcactcactgcgtccgtgctgagcctcctggccatcgcgctggagcgcagcctcaccatggcgcgcagggggcccgcgcccgtctccagtcgggggcgcacgctggcgatggcagccgcggcctggggcgtgtcgctgctcctcgggctcctgccagcgctgggctggaattgcctgggtcgcctggacgcttgctccactgtcttgccgctctacgccaaggcctacgtgctcttctgcgtgctcgccttcgtgggcatcctggccgcgatctgtgcactctacgcgcgcatctactgccaggtacgcgccaacgcgcggcgcctgccggcacggcccgggactgcggggaccacctcgacccgggcgcgtcgcaagccgcgctcgctggccttgctgcgcacgctcagcgtggtgctcctggcctttgtggcatgttggggccccctcttcctgctgctgttgctcgacgyggcgtgcccggcgcgcacctgtcctgtactcctgcaggccgatcccttcctgggactggccatggccaactcacttctgaaccccatcatctacacgctcaccaaccgcgacctgcgccacgcgctcctgcgcctggtctgctgcggacgccactcctgcggcagagacccgaktgkctcccagcagtcggcgagcgcggctgaggcttccgggggcctgcgccgctgcctgcccccgggccttgatgggagcttcagcggctcggagcgctcatcgccccagcgcgacgggctggacaccagsggctccacaggcagccccggtgcacccacagccgcccggactctggtatcagaaccggctgcagactgacaccctcggcccacgactgtyttcccaagttttacagacttgttctttttacataaaggaatttgtaggaaatgcagccaaaggtgcagtcggaaaagatgcaggggaaatgtatttatgcagcgacaccccacaatgtgaacaaacagacaaaaaatctgtgccctcgtggaattgacgttctgcttgggaacacagaaaagaactcggtgatgaaataatggagatgattccagtgacaaacgacagagatggtgatggtggtcagggaagacctctctgcagaggtagtgacttgtgatgtgagctgagacctctgtcctgggaagaccaaaagaaaagcatttcaggatgagggaatggcatgcgcaaaggccctgaggctgaaatgtgcccatgtgttctaagaaatgcagcgatgctggtgtgcctggagcagggacggagggggagaatgggaggagacaaggagctgaaggagtagttcccgaaggaccttgtgggtgatatagaggacttcgcttttgctctgagtgaggtgggagccatagaagcttctaagcagaagagggacttgccctaattcaggtgatcacaggtgtcttgtggcctccatgggaggttgaaaaccagagaaggtgaaggggggctgcactgagccacaggaacaatgatggagattccagctaagcccagaccccgtggattctagatagattttagaggcagcagacagaattactgaggaattgagtgtaagagtggaataaagttatcaaggacaatgccaagggtggggcacccccaaatttgactctgggagactcagccaaatcctatctggtaataaaatttcttttttatttttaaaaaaaaaaaaaaaaaaa

SEQ ID NO: 2465 - DNA, 3321 bp, Homo sapiens
ccacgcgtccgcggacgcgtgggcggacgcgtgggcggacgcgtgggcagcggtaggcgagagcacgcggaggagcgtgcgcgggggccccgggagacggcggcggtggcggcgcgggcagagcaaggacgcggcggatcccactcgcacagcagcgcactcggtgccccgcgcagggtcgcgatgctgcccggtttggcactgctcctgctggccgcctggacggctcgggcgctggaggtacccactgatggtaatgctggcctgctggctgaaccccagattgccatgttctgtggcagactgaacatgcacatgaatgtccagaatgggaagtgggattcagatccatcagggaccaaaacctgcattgataccaaggaaggcatcctgcagtattgccaagaagtctaccctgaactgcagatcaccaatgtggtagaagccaaccaaccagtgaccatccagaactggtgcaagcggggccgcaagcagtgcaagacccatccccactttgtgattccctaccgctgcttagttggtgagtttgtaagtgatgcccttctcgttcctgacaagtgcaaattcttacaccaggagaggatggatgtttgcgaaactcatcttcactggcacaccgtcgccaaagagacatgcagtgagaagagtaccaacttgcatgactacggcatgttgctgccctgcggaattgacaagttccgaggggtagagtttgtgtgttgcccactggctgaagaaagtgacaatgtggattctgctgatgcggaggaggatgactcggatgtctggtggggcggagcagacacagactatgcagatgggagtgaagacaaagtagtagaagtagcagaggaggaagaagtggctgaggtggaagaagaagaagccgatgatgacgaggacgatgaggatggtgatgaggtagaggaagaggctgaggaaccctacgaagaagccacagagagaaccaccagcattgccaccaccaccaccaccaccacagagtctgtggaagaggtggttcgagaggtgtgctctgaacaagccgagacggggccgtgccgagcaatgatctcccgctggtactttgatgtgactgaagggaagtgtgccccattcttttacggcggatgtggcggcaaccggaacaactttgacacagaagagtactgcatggccgtgtgtggcagcgccattcctacaacagcagccagtacccctgatgccgttgacaagtatctcgagacacctggggatgagaatgaacatgcccatttccagaaagccaaagagaggcttgaggccaagcaccgagagagaatgtcccaggtcatgagagaatgggaagaggcagaacgtcaagcaaagaacttgcctaaagctgataagaaggcagttatccagcatttccaggagaaagtggaatctttggaacaggaagcagccaacgagagacagcagctggtggagacacacatggccagagtggaagccatgctcaatgaccgccgccgcctggccctggagaactacatcaccgctctgcaggctgttcctcctcggcctcgtcacgtgttcaatatgctaaagaagtatgtccgcgcagaacagaaggacagacagcacaccctaaagcatttcgagcatgtgcgcatggtggatcccaagaaagccgctcagatccggtcccaggttatgacacacctccgtgtgatttatgagcgcatgaatcagtctctctccctgctctacaacgtgcctgcagtggccgaggagattcaggatgaagttgatgagctgcttcagaaagagcaaaactattcagatgacgtcttggccaacatgattagtgaaccaaggatcagttacggaaacgatgctctcatgccatctttgaccgaaacgaaaaccaccgtggagctccttcccgtgaatggagagttcagcctggacgatctccagccgtggcattcttttggggctgactctgtgccagccaacacagaaaacgaagttgagcctgttgatgcccgccctgctgccgaccgaggactgaccactcgaccaggttctgggttgacaaatatcaagacggaggagatctctgaagtgaagatggatgcagaattccgacatgactcaggatatgaagttcatcatcaaaaattggtgttctttgcagaagatgtgggttcaaacaaaggtgcaatcattggactcatggtgggcggtgttgtcatagcgacagtgatcgtcatcaccttggtgatgctgaagaagaaacagtacacatccattcatcatggtgtggtggaggttgacgccgctgtcaccccagaggagcgccacctgtccaagatgcagcagaacggctacgaaaatccaacctacaagttctttgagcagatgcagaactagacccccgccacagcagcctctgaagttggacagcaaaaccattgcttcactacccatcggtgtccatttatagaataatgtgggaagaaacaaacccgttttatgatttactcattatcgccttttgacagctgtgctgtaacacaagtagatgcctgaacttgaattaatccacacatcagtaatgtattctatctctctttacattttggtctctatactacattattaatgggttttgtgtactgtaaagaatttagctgtatcaaactagtgcatgaatagattctctcctgattatttatcacatagccccttagccagttgtatattattcttgtggtttgtgacccaattaagtcctactttacatatgctttaagaatcgatgggggatgcttcatgtgaacgtgggagttcagctgcttctcttgcctaagtattcctttcctgatcactatgcattttaaagttaaacatttttaagtatttcagatgctttagagagattttttttccatgactgcattttactgtacagattgctgcttctgctatatttgtgatataggaattaagaggatacacacgtttgtttcttcgtgcctgttttatgtgcacacattaggcattgagacttcaagcttttctttttttgtccacgtatctttgggtctttgataaagaaaagaatccctgttcattgtaagcacttttacggggcgggtggggaggggtgctctgctggtcttcaattaccaagaattctccaaaacaattttctgcaggatgattgtacagaatcattgcttatgacatgatcgctttctacactgtattacataaataaattaaataaaataaaaaaaaaaaaaaaaaaaa

SEQ ID NO: 2466 - DNA, 3321 bp, Homo sapiens; identical to SEQ ID NO: 2465

SEQ ID NO: 2467 - DNA, 1405 bp, Homo sapiens; identical to SEQ ID NO: 708

SEQ ID NO: 2468 - DNA, 495 bp, Homo sapiens
  misc_feature (1)..(1): n equals a,t,g, or c
  misc_feature (6)..(6): n equals a,t,g, or c
  misc_feature (46)..(46): n equals a,t,g, or c
nagttnagacggggggggggaaaagggagagaaatccttctccacntactcctgtgaccaaggcttatgtggtcaggactgagcaggggactggccctcccctccccacagctgctctacagggaccacggctttggttcctcacccacttcccccgggcagctccagggatgtggcctcattgctgtctgccactccagagctgggggctaaaagggctgtacagttatttccccctccctgccttaaaacttgggagaggagcactcagggctggccccacaaagggtctcgtggcctttttcctcacacagaagaggtcagcaataatgtcactgtggacccagtctcactcctccaccccacacactgaagcagtagcttctgggccaaaggtcagggtgggcgggggcctgggaatacagcctgtggaggctgcttactcaacttgtgtcttaattaaaagtgacagaggaaaaaaaaaaaaaaaaaaag

SEQ ID NO: 2469 - DNA, 133 bp, Homo sapiens
  misc_feature (120)..(120): n equals a,t,g, or c
tgtcttgttctccaaacatctggagtaaaaatcaaagatttataatgaccagtagtttggagaaaaggggtttaatatgtttgttcttgatatttaggytactwgaagattatttaatanaaattatacctcc

SEQ ID NO: 2470 - DNA, 565 bp, Homo sapiens
  misc_feature (379)..(379): n equals a,t,g, or c
  misc_feature (554)..(554): n equals a,t,g, or c
ggcagtttcttgatacctctgtgaagtcttgagaaagagtagctattgcttatccctcgtaacaggaagaaacttgtgacttaaaaaaaaaaaaaacatgttatctctctctagaactttggactgtggctagggcaagaatgtcagaggtacaatgctttgattttgggtccataactcacatactgtaagcatgtgacataataattaatggtcattagtcaggtcatcaatgttgatttatgatcttttttgttttatgtatattttcacctacctgaatgtttggcatatctcttggaggtataattcyattaaataatctcaagtagcctaaatatcaagaacaaacatattaaacccctttctccaaactacnggtcatwataaawctttgawttttactccagatgtttgggagaacaagaccagaaagggtgtgataaaggataaagaatggtgatttagscctggggcgcaatgggctttacacatgtaatcccaaccatttttggggaggtgggaagcagaagggattgcttgagttccagggngcttgagacaa

SEQ ID NO: 2471 - DNA, 2604 bp, Homo sapiens
ggcacgaggagatcttgagtcacagtgaagcaacccactggagtgagcattgctgcatttggagagtcagatgscattttgggccgcgatgggcctcttggaacattggtgtgttcatctgcattcgatgtgctggaatccacaggaatctgggggtgcacatatccagggtaaagtcagttaacctcgaccagtggactcaagaacagattcagtgcatgcaagagatgggaaatggaaaggcaaaccgactttatgaagcctatcttcctgagacctttcggcgacctcagatagacccagctgttgaaggatttattcgagacaaatatgagaagaagaaatacatggaccgaagtctggacatcaatgcctttaggaaagaaaaagatgacaagtggaaaagagggagcgaaccagttccagaaaaaaaattggaacctgttgtttttgagaaggtgaaaatgccacagaaaaaagaagacccacagctacctcggaaaagctccccgaaatccacagcgcctgtcatggatttgttgggccttgatgctcctgtggcctgctccattgcaaatagtaagaccagcaataccctagagaaggatttagatctgttggcctctgttccatccccttcttcttcsggttccagaaaggttgtaggttccatgccaactgcagggagtgccggctctgttcctgaaaatctgaacctgtttccggagccagggagcaaatcagaagaaataggcaagaaacagctctctaaagactccattctttcactgtatggatcccagacgcctcaaatgcctactcaagcaatgttcatggctcccgctcagatggcatatcccacagcctaccccagcttccccggggttacacctcctaacagcataatggggagcatgatgcctccaccagtaggcatggttgctcagccaggagcttctgggatggttgcccccatggccatgcctgcaggctatatgggtggcatgcaggcatcaatgatgggtgtgccgaatggaatgatgaccacccagcaggctggctacatggcaggcatggcagctatgccccagactgtgtatggggtccagccagctcagcagctgcaatggaaccttactcagatgacccagcagatggctgggatgaacttctatggagccaatggcatgatgaactatggacagtcaatgagtggcggaaatggacaggcagcaaatcagactctcagtcctcagatgtggaaataaaaacaaaacacctgtatggctgccattctcttcagccctcgctctcccctttccacagcctccacccctgacccccatcctcttttcctacctctctgtttggtttagaaattgctcaataagtcatttggggtttggcatcctgcccagccacttcccaaacatgaagacctctctgttgctttatgttgtacatgccccatagccatcccaacgtcctccccagtcctctcctggcaccagcaccttagaagttgttggcagaaggcacttaaactgtgggagaagtgtgcacacctttgagtcccttccctcaaggttaaagctcctgtcagactctcagaagggtctgtgggtgttgtatattaggcaaacaggggaaagcttagaggtccttctatatgtgttaataagctgtttctaagtgtttaaatttgaaaagcatcatgttctcatgatttatgggaatgaagcaagtactgaaatcaaattaaatactccctgggtcctgggtcagtttgaccctagccctggggtgaggcaagccccctcctatgaggatgagcaaaaatactactctcttcgccctgagttgctttctggatctggggcttcaggacttgctgcttcagtcagcctttattagcaccaaagactttatgaagatcccacacacagacacacatcccttcccgcctcccccctgccttcagtaggatctggctccgtggctggaggaccaacccctatagtgggaatgcagagcttaacgtgtactgcttgtgtgtgtgcgtgagtgtgtgtgtgtgtatgagtgtgtgttccgcctcccaccctctccccatctgctctgggtatttttgtttttgtttagttttaggtttacaacagagaggaattaatttatcagcagcctaaaactgttgtgtttttcttatggtttaaaaaacgccatgtcattgataactccctttctcccttcccttctcccggtctgctgatcactctttcatgcctgtgtatccagggtgctctgtttccccaccgttcccaggtgtacgaggcagagggccgggacagctttcctctcagtcattgttcaccccacttgaaaattcagacaagaaaactttgcttaaaagatttcatgtgtgggaaccacagttcctggctgcctttctcctgtgtatgtgtaaattccttaataaatattgcagggaaggacaaaaaaaaaaaaaaaaaaaaaaaaaaaaaaaagggcggccgctctagaggatccctcgaggggcccaagttacgcktgcatgcgacgtcatactctctccctatactgagt

SEQ ID NO: 2472 - DNA, 697 bp, Homo sapiens
  misc_feature (339)..(339): n equals a,t,g, or c
catttgaacttatatttttgttacatctctgcaaattattttcatgggtttaagtatttttaattcattttatttttatttgcaaaaacattgcacatacatctaatttttaaaaattttctgggatcataagactacatggktaaaatattctattatacttttatagcagattcaatcaaaataagataattactgaataaaatgkaaacattgactagaaatggcccttttaatgaaatcaataggcatcckggatatctatagatgaataatttttagtgctagttaagcagatacaggkttttgkctcaattatattyctttcttggkttttcntggtttttaattgaggkacgtgctgagtaacttgktcacataataaagtagatgacagtggaaagkattttattttcagtattagtcaattatttgaacttgccaaaaatcacataatgatttattatcaaaaattatttgtaatgatcctgtggactgacaattcacttgaatcttccctcaatattgtgaagagcagaaaattggaaaccatctgattaacaaaaagattatttctagtcaataaacttagcatttctgagaagtgtctcaaaaacatttaccaaaacttaaaaaatgaaaataactatactgcctttttatcatttagaggcaaaaaaaaaaaaaaagggcggcc

SEQ ID NO: 2473 - DNA, 828 bp, Homo sapiens
  misc_feature (9)..(9): n equals a,t,g, or c
  misc_feature (45)..(45): n equals a,t,g, or c
  misc_feature (68)..(68): n equals a,t,g, or c
  misc_feature (786)..(786): n equals a,t,g, or c
aattggcangagatgtaaacaaaaataaaagttcaaatgtagatngaatacagaatttatcatttttntgtcccatgatcattcattcatttatttttaaatgattgatactgagcatcagatttttttttttttgagaaagatgtggtctcattatgctgaccagcttcaagtacagtggctgttcctaggcactawtatagtacactgcagcctcaaastctgagcctcaagtgatcctcccacctcagcctcccaagcagctaggcctacagtcatgctgtacttaaccagaytaattttgatattgagattccattgttgttttagaaagaagttactgtttctgttcwtatgcaaaaatttgtagtagaaagaaaattcaaaagaaatttttagaccttttttagttctgggaatgattgttttacattgaatatgtcccttacggacaatttgcagtcagtggataattttagagatataaataaataatacacaagcaacagcacagcttttcagaattttataagacctttcattcaattcacaatgtgtcataactatataaatagtataataatagaaacgtacttatgaatttatcgtaacacattccatttcgatattcaagctagaatgaaacaattcaataagaaagcttttcatgaagagtttcaagagagtgwataaaaagaaaggctccatattcatcccattgcattctggcttatgacacgaaaattgtaaaaaatttctcaaatagcaggtgaaaaacagaacaanttagactccagaaacagggccattcacatgactcagaagaga

SEQ ID NO: 2474 - DNA, 564 bp, Homo sapiens
  misc_feature (521)..(521): n equals a,t,g, or c
  misc_feature (538)..(538): n equals a,t,g, or c
gggggctactcatttgttttcacatatttatctatttgttcccttggtttcaaggctttaaacagaaattcagagcattttcatggtatctgggcatcattacaatatttactaaaagagaagtcctaaacatggtcattttatgggagaaatcagtagcacatggtgtttatgcaatgttatatatgattttactcattatgccaactgtattaaggggattccatctttctttgggccctcatcaggctaccacgatatacaatgagtggtatacttaagctctggctgaattgttctgtaatgtaatctgactcaaggagaacaaatggagaggtcttgtcatctactgtgtcatgtgaatttctcgkttctgggagtctaagttgttctgtttttcacctgctattgagaaatttttacaatttcgtgtcataagccagaagcaatgggatgaatatggagccttccttttatacactccctgaaactctcagaaaagcttctatgaatgttcatcnagctgatacgaaatggnatgggttacgataaatccaaagtacg

SEQ ID NO: 2475 - DNA, 1837 bp, Homo sapiens
  misc_feature (111)..(111): n equals a,t,g, or c
  misc_feature (126)..(126): n equals a,t,g, or c
  misc_feature (1808)..(1808): n equals a,t,g, or c
tcggccccattgccgcaaatggccsgtaggcstgyacggtggaaggtctatataascagagytcgttagtaaccgtcagatcgcctgaagacsccatccacgctgttttgncctccatagaagmcnccgggaccgatccagcctccggactctagcttaggccgcgggacggatamcawtttcacacaggaamcagctatgaccactaggcttttgcaaaaagctatttaggtgacactatagaaggtacgcctgcaggtaccggtccggaattcccgggtcgacccacgcgtccgaaagaacccaaagtcagcttctccagatggtcctgcaaggctggaagttcaatggtggaagcttatattatttttctagtgtcaagaagtcttggcatgaggctgagcagttctgcgtgtcccagggagcccatctggcatctgtggcctccaaggaggagcaggcatttctggtagagttcacaagtaaagtgtactactggatcggtctcactgacaggggcacagagggctcctggcgctggacagatgggacaccattcaacgccgcccagaacaaagcgtgagtctagccaccatctggcgctgtcccaggcactgtctttggtggacctagctacacactgtgtgtcccttcccagtaagtggtagtgttgtgtgtatatgtgtgtgtgacgtgtgtggtgtgtatgtggtgtatgtgtggtgtgtgtgccatgtatgtggcatgtgtaatgcatgtggtgtgcgaggtgtatgtgtggtatgtgtgtgatgtgtgtgcgtttggacacacaggtgtggtcatcgctctcacctggactcctccacagagggtcattaggaaaggacaggtcctgaggctggcatgcagccagtgagtgggtctttctgtttttttccccctgccctactcaggcctggttccaagggatcctgcccactcagaaagtatattattgtgaattctgggatgggagcttgcagcttcatagacacccctccctgtccctggatcctcagtaactaagagcaacctgagcacagacaccctcagggtactccttctcccagccctgtcctcatcctagggccactaggggatgaaggacccatctcaagtcagctccctagactcatcccatgtcagctccctaggagccacagcaccaggaagggatgctgccttcatctaacagtataaagccctgttgtcttcgggttttgggaaaagaatcagtctgacaactggcggcacaagaatgggcagactgaagactgtgtccaaattcagcagaagtggaatgacatgacctgtgacaccccctatcagtgggtgtgcaagaagcccatgggccagggtgtggcctgagggcaggccagagctgaggggctgctcctgcttgccaatactgaccctcctcctcgatgccttcggagcctctgagctctgcttgttctctgggaccttccgttggccttgtggacttcctgccttgttctttgattcagccctttcaaacatgcttacctcgagtgacccagtgacatcagtggcttctcaagggaagagccttgctgtgcccctgtagcctcagcacccagcacaggcctgtcagacagcaggtcctcaataaatactcgctggatcaacaaaaaaaaaaaaaaaaaaaaaaaaaaaaaaaaaaaaaaaaaaaaaaaaaaaaaaaaaaaaaaaaaaaaaaaaaaaaaaaaaaaaaaaaaaaaaaaaaaagggsggccgctctagaggatccctcgaggggccccacngttacgcgtgcatgcgacgtcatagctct

SEQ ID NO: 2476 - DNA, 2064 bp, Homo sapiens
  misc_feature (45)..(45): n equals a,t,g, or c
cttgtgattttaaaatccccaccatttagatccctagctctgkgnataatattttcataatcatactcagtaagcaaaactctcaagcagcaagcatatgcagcttagtttaccccattatmcacttaaaaattttatatttaccttagagctttaaatctctgtaggtagtttgtccaattatgtcacaccacagaagtaaggttccttcacaaagatcccaagctagcagatctcccagtcacgacgttgtaaaacgacggccagtgcctagcttataatacgactcactatagggagagagctatgacgtcgcatgcacgcgtaagcttgggcccctcgagggatcctctagagcggccgccctttttttttttttttttgatcatttaaaagtgtttattttctaaatgggagtaacacagagggaacttttggcaccttctttccagtccatcacccccatcatgtcctcccaaacacaaagcaatggcaggagaaaccacaggacagtcacaaagtcagtcacagagagatctgtacaatcccggatagctggaattcaagagtctgtcccagctatcttgtcctggagtggggttacagctcaggggcatagggctcctcagtaggtgaaggtacccgcagctcagcatcatgccttaccacggtgaagagtcccaccactgccagcagagccatcaccatgacagcagagcaaatgctgaacatattccgagtgcctgtttttcgatcactgtcatggaggacaaggagccctaggcaagccagtgagtgcagaggtacccggaaccagttgagtacaccagcctgctctgtctcagggatcacctttctccgtaggaagctcatgctgggaaagtataatccacaagccaactcaataagtagaaaggctatgaaggactccaccggactctcctggcctgggctggtagagaaagtcaacatgaagagagagaagacgacgatgagcacagcaagggacagcaggtgcatgggctgaaggtggtacctcttggaggtggcgatacggtacagggaagagccaagcaggctggctgccatgaagctggagaagataatgcccagaggggccccgtgtgggtccagcacaggtgtccagaggaagacaaagatgaagatgacactctcaaatagagcttgtatggtgcccarcagcagcacgcggcggtccgacaggaggcagcgcaggcctccagcacaggtccttgagaaggcacgctgccggtcatagttctccccccagtttcgaagggccaaggcccctgccagagccaggagagggatggcagccacaaagggcgctacaggccccagccctatccagctggctacagcctcagctgccacacctgccactacagccagcacatggttccagaaggcagctcgagcaaaggtagctgggatccactcagcagggaagtcatgccgttccacgtgctcatggatataccaggcctcgaaggctgagaagagcagggctgtggacagcccaccaagtgctcgccccactagcagcacaaagtagtcttgagagagtttggttaagcagcatagtgagtaagtcagggagaagaggacacaagaattcttgcgacccagccaatccacaagggaggaggccactaggccaaagaggactgtagaggcaaggccacagacatagaggatggcaatttgaccttccaggaagtagtaatgctggtagagtttatagaggtagggggcctgaagccaatcagctgccagggccaggaagtagacctgatagaagtccagttgaaaccgaaggaaggagggattgctgcaggcccttccagggggtttagcccggcatcttgacagttccagccccaggcaggaggccaggaggcctacaaaagcaaggtaggcagtcaccagcatggtgggcccccggacgacctcccgtcctcgctgcggagcctctttttgccctcagtgtctcatcctctgtcccgggcatccctcccacccgcgcaggcctctcgagttgcc

SEQ ID NO: 2477 - DNA, 1706 bp, Homo sapiens
  misc_feature (65)..(65): n equals a,t,g, or c
  misc_feature (140)..(140): n equals a,t,g, or c
agctctgggttcaagccctgggtggctgcttactaccaaaatcgctcagtagctccaagcctgcntgcagagggttggcaccattaaatgaggtaacgagtcaaaagtccctaccctgggtcctagcctgttaagggctncgaaaacccaggctcaggwcggtcctgcccggcacctgtttcacacatgtacactccggtytgaggttggtcctctcccccaccccacccagccttgagccgttgagcagctgaacagaggccatgccggggcactccgaggcctgagacgaccacgcctgtgccgctgaggaccttcatcagggctccgtccacttggcccgcttggctgtccaatcacactccagtgtcaaccactggcacccagcagccaagagaggtgtggcgtggccctggggacgcatggctgaggcaggaacaggtgagccgtcccccagcgtggagggcgaacacgggacggagtatgacacgctgccttccgacacagtctccctcagtgactcggactctgacctcagcttgcccggtggtgctgaagtggaagcactgtccccgatggggctgcctggggaggaggattcaggtcctgatgagccgccctcacccccgtcaggcctcctcccagccacggtgcagccattccatctgagaggcatgagctccaccttctcccagcgcagccgtgacatctttgactgcctggagggggcggccagacgggctccatcctctgtggcccacaccagcatgagtgacaacggaggcttcaagcggcccctagcgccctcaggccggtctccagtggaaggcctgggcagggcccatcggagccctgcctcaccaagggtgcctccggtccccgactacgtggcacaccccgagcgctggaccaagtacagcctggaagatgtgaccgaggtcagcgagcagagcaatcaggccaccgccctggccttcctgggctcccagagcctggctgcccccactgactgcgtgtcctccttcaaccaggatccctccagctgtggggaggggagggtcatcttcaccaaaccagtccgaggggtcgaagccagacacgagaggaagagggtcctggggaaggtgggagagccaggcaggggcggccttgggaatcctgccacagacaggggcgagggccctgtggagctggcccatctggccgggcccgggagcccagaggctgaggagtggggcagcccccatggaggcctgcaggaggtggaggcactgtcagggtctgtccacagtgggtctgtgccaggtctcccgccggtggaaactgttggcttccatggcagcaggaagcggagtcgagaccacttccggaacaagagcagcagccccgaggacccaggtgctgaggtctgagagggagatggcccagcctgaccccactggccactgccatcctgctgccttcccagtggggctggtcagggggcagcctggccactgcctagctggaatgggaggaagcctgcaggtggcaccggtggccctggctgcagttctgggcagcatcctcccaagcagagaccttgctgaagctcctggggtgtggggtgtgggctggaagcactggctccctggtagggacaataaaggttttgggtctttctgaraaaaaaaaaaaaaaaaaaaaaaaaaaaaaaaaagggaggg

SEQ ID NO: 2478 - DNA, 877 bp, Homo sapiens
ttttttttttttttttttctgtgcaacttgtttatttccattttatttttacacaaaggcaaagagaataggagtgaggaggcaggaataacgctgggtcactcccaggaagtggggaagaggctgcagccaagaagaatgagtcaggctgctcttccttggctttcttggtaacagcaatgaacaaaaggaagacgaggcatggactccaggcttaagttaacaaggtcagtctgttcaggccaagcaatggaaaggaagtgtcagatctgtccaatccatgttcataaagaggaaataaggcctaggtccgtctattgaggccttggctcaggattggctggggcccttctctttgaaggtcgaggccgctgtccccagggcgtataggggccacggggacgatacctgccaaaacccctatgtaccactggggcaggccgctgataacggggtgtggggaagaagggcataggcagctgaggaccaaccataaaattgtcttcgacgaagaaacctgcatgggctgatgaggggacatctgaatggcaatagaattgatccgactggaaagtatggtctgagggaaaacaggcatctgggggaccctgtgggaaccggggcattccctggtgatggagaatgggaggaggaggctgtggggacaggagcgggagcagcggcaagcgctggggtgggaacccaagcagggggcggtatgtgggggaaggtaagggtggggacagaggtaaggccgggtgatttctgttggcctggggcggcccttcgactctcgggccaggttttttcttcttgatccactcgcccacggggtggcggtggggcagctccacaccccaggcgtcggcctcgtgcc

SEQ ID NO: 2479 - DNA, 2410 bp, Homo sapiens; identical to SEQ ID NO: 1026
  misc_feature (2264)..(2264): n equals a,t,g, or c
  misc_feature (2325)..(2325): n equals a,t,g, or c
  misc_feature (2345)..(2345): n equals a,t,g, or c
  misc_feature (2365)..(2365): n equals a,t,g, or c
  misc_feature (2391)..(2391): n equals a,t,g, or c
  misc_feature (2402)..(2402): n equals a,t,g, or c

SEQ ID NO: 2480 - DNA, 1167 bp, Homo sapiens
  misc_feature (26)..(26): n equals a,t,g, or c
tgatggttgagatgtgtataagaagnacagcctcaacacaccactgtggggaagcacaggacgatgggaaggtgccccacatcgtccccaaccatcacctgccattgcccacttactacaccctgcccaatgccaccgtgagtattttgagggcggcagtggaggtctgtggggggcggaccttgtctctgtctcctgcccctcctgacctgccccatgccasgtggctcctgaaacgcgggcagtaatcaagtggatgaagcggatcccctttgtgctaagtgccaacctccacgggggtgagctcgtggtgtcctacccattcgacatgactcgcaccccgtgggctgcccgcgagctcacgcccacaccagatgatgctgtgtttcgctggctcagcactgtctatgctggcagtaatctggccatgcaggacaccagccgccgaccctgccacagccaggacttctccgtgcacggcaacatcatcaacggggctgactggcacacggtccccgggagcatgaatgacttcagctacctacacaccaactgctttgaggtcactgtggagctgtcctgtgacaagttccctcacgagaatgaattgccccaggagtgggagaacaacaaagacgccctcctcacctacctggagcaggtgcgcatgggcattgcaggagtggtgagggacaaggacacggagcttgggattgctgacgctgtcattgccgtggatgggattaaccatgacgtgaccacggcgtggggcggggattattggcgtctgctgaccccaggggactacatggtgactgccagtgccgagggctaccattcagtgacacggaactgtcgggtcacctttgaagagggccccttcccctgcaatttcgtgctcaccaagactcccaaacagaggctgcgcgagctgctggcagctggggccaaggtgcccccggaccttcgcaggcgcctggagcggctaaggggacagaaggattgatacctgcggtttaagagccctagggcaggctggacctgtcaagacgggaaggggaagagtagagagggagggacaaagtgaggaaaaggtgctcattaaagctaccgggcmccttaaaaaaaaaaaaaaaaaaaaaaaaaactcgagctcgtgccgaattc

SEQ ID NO: 2481 - DNA, 3773 bp, Homo sapiens
ggcattacctggtagtaataaaaataaataggtctaagccagaggccacaggttggaaatcttctgatattgcagcatgacatttctgacctggaaagatctatagaatgcaggcttcaccttgttaatttattgatgcacagacagaggcatgaaggggaggtgctttgtcagggccaacatcaatggccacaccagggctggaacccaggctcaccgactcccaggccactgtgcttggctctgccctctccctgaaccagccttagcacctcaaggcgggagttgatggtcctcattcccttccctctgtgtctccttacagcctagcagaactggagaaggaggtgggcaacctcaggaggggcctgagagcggtggaggtggagctggagtatcagaggcgccaggtacgggagcccagtgacaagtttgtccctgtcatgagcgacttcatcacggtgtccagcttcagcttctccgagctggaggaccagctaaatgaggccagggacaagttcgccaaggccttgatgcacttcggggagcatgacagcaagatgcagccagacgaattctttggcatctttgataccttcttgcaggccttctcagaggcccggcaggatctagaggccatgaggaggaggaaggaggaggaggagcggcgggcgcgcatggaagccatgctgaaggagcagagggaacgtgagcggtggcagcggcagcggaaggtcctggctgcaggcagctcgctggaggagggaggagagttcgatgacctggtgtcggccctgcgctctggggaggtcttcgacaaggacttatgcaagctcaagcgcaccgcaagcgatcagggagccaggccctggaagttacccgggagcgggcaataaaccggctaaattattgacctggggaactagccacacaggaggccgggagacagggactggtgagaatggggctgagtggaggaggtggtgatatttaaaccatttggtgcttggtttagagccttgggctgggtcctgggatggggggctgtgtgwggctggaccaggtgtctccccacgcttaccttaaggggctcctcttatctccccttcacaygattccttctgtgccctggccccaggtattattctgaggctgccttggatggcctcaggccaggtaaccccaggctgaaggggccctgctccccatcccctaccatgggcacccatgtgctggcacagaacagttccagatctagactggagaggtccacagccttgtccagagttcctgtgtwgcacgggsagcaatgatggagggagcccctgagagggaatctggtgagggaatccagactcccttctctcaaggggaggctcaacagaacattgacctgggggcaaactttcctcttgaatgggaacagaggaggcattatatattctagttagatcagctctggtaggttccagagaacagtcaatgttggaaggatgatgcagggaccaaagccatcaggacagagtagcagtgtctgtttcccatgtcacaagtcctctggcctctccctgcatgtcttaagtatctttcccttccttctctaccctcacctccatcctgtctactaatccacagtcctagaagactcaccttgggtttccacagctatggctcactaccaggtgcttgatgaatctggcgaggggctcaagacagacctcatgcatcaccacacctcatgccttttgggcatctcccatgtccccatctcctggacacctggccattgttgtgaagccagacagtgacctcaaatgttgccttggagtcccctacagcccctcagcagasggcagcacttgaatgcttagctccatcccatagttctctacttcatataaattgctcaggccctcccaccccttctctaacactagcttcaaggcagaagccacagcagcctctgtccagcctgcaggtggccacttggaaccatgtgtccactggcgttggggagttggttcctgagaggtctgagggccagagctgccctctacattaacatgctgtctctaagggtggcccctcctctcaggcgttcagatggtgcgaacagcagagcaggcaagggaaactggggagatggggatggaggaggaaggctgatatcctctggggagcacatcacctgaaggtgccaaggaggaaggctgagaggggggccaccccatttctggtacccaatttggttcttcagcccaacttgcaaggggttccttctggtcctcccatccactgccaccttccattttgtccatctcatgctggccttggtggatgggatggctgtatctagacaaaatttttctaaaactccatcaaggctcttattcaataccacgttccgagttggcctttcatcttctttgagactggccctgcctaacctctaccatcaatgagctcttggcccttctgcccttccctgtgtttctcactttccaacctaatccctggctcagggttattgccagtggagactggtgagctgggcctactctcagctgcctatcttctgcctttcacttgcatccaactcctggggctgggaccgtagtagctgcgggggggaagaaacacagggtcggtgagcccagcatgtgcgttggtttgagggggcgggcggtgtgtgtgtgttctggtgggagggatctgagcaagtgcaagcctggctgacacaggtgtgaagaggccatcctggaacccaggtgagggcaagatgaaggcttccaggcagaacagctgcagagagtttggctatatgcatctgcagccccaagagctcccactgcaagacaagtgttggggaagatgggaggttgtgggtgaggcctctaaaggtcctctcccaaactgaccaggctgatgtcaacctaaccccctcaggggcagggaacaggggagggctccacaagcgtgtctggcattcccacccaccatggaagactggatacgcacctggaaacaaaaggactatggaagctgttcaagatacatttgatcttcagaaaagcagaatttggttcaactgttgacagaggacacaaatacgttgttccagagctcagccttctcactctaaaagaaagatatttttctatttattttctacatctggccagtggctctggtgctagatgccactgtagccagatctccaacagtgccttggaccatggactcatactcaactgagtaagaaggggctggtgcccagtcggggtggctgagctggtccttaataggttgtttcttggtcttgctttcttcatgccctccccactgctcctgccacctttagataagtttctctagctaattttgtggccaatgtaaaattcgtcatcaacctaacaaacacaaccttctcagcagcatttctcccctgtgatggaaataaagtgtttagggcagtgggaggagaaaattctccaggtgaatggggaagggtctgttccagcctctccctactcccatcccatttccaccaactggggaactgtgactatctatctcccccgacttctaccagggatgccttcacgccaaggctgttctcaccagctgcctcagatgacaaatgaggctaatggacataatctacagtgtcctttttcacttgcaccttttttataagaatatattgtaatactaaaaaatattaaattcataccatccctaaaaaaaaaaaaaaaaaaaaaaaaaaaaaaaaa

SEQ ID NO: 2482 - DNA, 6708 bp, Homo sapiens
gaattcggcacgagcagagatcgcgagcgaggcaccagcctgcagccggcccccagcacatcctcagccgcacagacactcggcgaggtggaggtgagggcgggcgccagcgaactcggagaggggctcgctcactcccaggcgatcccagccgccaccgccgccgcaccagcagcagcaacagcagcagcagcttccttcctcagactcccctcgagaggctggccaagcgggtgtagccgttgggggaggctcccgccgggggaacccggcgaggacaagagcagggcggccgccttccactcgggctgtccggcggcggctgcctccgcccgygtgtccgtcaagggtgccgcgggatgtgtgtcagtttacgcctctgagatcacacagctgcctgggggccgtgtgatgcccaaggcaagtcttggttttaattattattattatcattattgttacgcttggctttcgggaaatactcgtgatatttgtaggataaaggaaatgacactttgaggaactggagagaacatatatgcgttttgtttttaagaggaaaaccgtgttctcttcccggcttgttccctctttgctgatttcaggagctactctcctcctggtgaggtggaaattccagcaagaatagaggtgaagacaagccaccaggactcaggagggaaacgctgaccattagaaacctctgcataagacgttgtaaggaggaaaataaaagagagaaaaacacaaagatttaaacaagaaacctacgaacccagctctggaaagagccaccttctccaaaatggatatgtttcctctcacctgggttttcttagccctctacttttcaagacaccaagtgagaggccaaccagacccaccgtgcggaggtcgtttgaattccaaagatgctggctatatcacctctcccggttacccccaggactacccctcccaccagaactgcgagtggattgtttacgcccccgaacccaaccagaagattgtcctcaacttcaaccctcactttgaaatcgagaagcacgactgcaagtatgactttatcgagattcgggatggggacagtgaatccgcagacctcctgggcaaacactgtgggaacatcgccccgcccaccatcatctcctcgggctccatgctctacatcaagttcacctccgactacgcccggcagggggcaggcttctctctgcgctacgagatcttcaagacaggctctgaagattgctcaaaaaacttcacaagccccaacgggaccatcgaatctcctgggtttcctgagaagtatccacacaacttggactgcacctttaccatcctggccaaacccaagatggagatcatcctgcagttcctgatctttgacctggagcatgaccctttgcaggtgggagagggggactgcaagtacgattggctggacatctgggatggcattccacatgttggccccctgattggcaagtactgtgggaccaaaacaccctctgaacttcgttcatcgacggggatcctctccctgacctttcacacggacatggcggtggccaaggatggcttctctgcgcgttactacctggtccaccaagagccactagagaactttcagtgcaatgttcctctgggcatggagtctggccggattgctaatgaacagatcagtgcctcatctacctactctgatgggaggtggacccctcaacaaagccggctccatggtgatgacaatggctggacccccaacttggattccaacaaggagtatctccaggtggacctgcgctttttaaccatgctcacggccatcgcaacacagggagcgatttccagggaaacacagaatggctactaygtcaaatcctacaagctggaagtcagcactaatggagaggactggatggtgtaccggcatggcaaaaaccacaaggtatttcaagccaacaacgatgcaactgaggtggttctgaacaagctccacgctccactgctgacaaggtttgttagaatccgccctcagacctggcactcaggtatcgccctccggctggagctcttcggctgccggtcacagatgctccctgctccaacatgctggggatgctctcaggcctcattgcagactcccagatctccgcctcttccacccaggaatacctctggagccccagtgcagcccgcctggtcagcagccgctcgggctggttccctcgaatccctcaggcccagcccggtgaggagtggcttcaggtagatctgggaacacccaagacagtgaaaggtgtcatcatccagggagcccgcggaggagacagtatcactgctgtggaagccagagcatttgtgcgcaagttcaaagtctcctacagcctaaacggcaaggactgggaatacattcaggaccccaggacccagcagccaaagctgttcgaagggaacatgcactatgacacccckgacatccgaaggtttgaccccattccggcacagtatgtgcgggtatacccggagaggtggtcgccggcggggattgggatgcggctggaggtgctgggctgtgactggacagactccaagcccacggtagagacgctgggacccactgtgaagagcgaagagacaaccaccccctaccccaccgaagaggaggccacagagtgtggggagaactgcagctttgaggatgacaaagatttgcagctcccttcgggattcaattgcaacttcgatttcctcgaggagccctgtggttggatgtatgaccatgccaagtggctccggaccacctgggccagcagctccagcccaaacgaccggacgtttccagatgacaggaatttcttgcggctgcagagtgacagccagagagagggccagtatgcccggctcatcagcccccctgtccacctgccccgaagcccggtgtgcatggagttccagtaccaggccacgggcggccgcggggtggcgctgcaggtggtgcgggaagccagccaggagagcaagttgctgtgggtcatccgtgagaccagggcggcgagtggaagcacgggcggatcatcctgcccagctacgacatggagtaccagattgtgttcgagggagtgatagggaaaggacgttccggagagattgccattgatgacattcggataagcactgatgtcccactggagaactgcatggaacccatctcggcttttgcagtggacatcccagaaatacatgagagagaaggatatgaagatgaaattgatgatgaatacgaggtggactggagcaattcttcttctgcaacctcagggtctggcgccccctcgaccgacaaagaaaagagctggctgtacaccctggatcccatcctcatcaccatcatcgccatgagctcactgggcgtcctcctgggggccacctgtgcaggcctcctgctctactgcacctgttcctactcgggcctgagctcccgaagctgcaccacactggagaactacaacttcgagctctacgatggccttaagcacaaggtcaagatgaaccaccaaaagtgctgctccgaggcatgacggattgcacctgaatcctatctgacgtttcattccagcaagaggggctggggaagattacattttttttycttttggaaactgaatgccataatctcgatcaaaccgatccagaataccgaaggtatggacaggacagaaaagcgagtcgcaggaggaagggagatgcagccgcacaggggatgattaccctcctaggaccgcggtggctaagtcattgcaggaacggggctgtgttctctgctgggacaaaacaggagctcatctctttggggtcacagttctattttgtttgtgagtttgtattattattattattattattattattattatattttatttctttggtctgtgagcaactcaaagaggcagaagaggagaatgacttttccagaatagaagtggagcagtgatcattattctccgctttctctttctaatcaacacttgaaaagcaaagtgtcttttcagcctttccatctttacaaataaaactcaaaaaagccgtccagcttatcccatcctctgattgtcttctgacttaagggatttactgtggtgtaggttctgccagccaaccctacaagctgccatttccagtcctagcatttaagtaggatgttgttgcctttaacttttcttatccaggggaaaattgccattttagggtcagcatgaacagctctttcttgtatgcgatttaaaacaaactggaaaggaaacttcacacgtcaaaatccatagaagcgcctggacgaggcttaaagtgctttgtgagtgaataggagccattcgctaattctagacccacagtgtctggtggtggggcttcccttgtggggcttctggtggtggttttgccttttcttttccctcctccatgttcttctaaaacatatacatatatacatacacacatacacatattcttcaggtctctaagcccctggaagcagcattgtgtgatattctcagaggcaggggaaaatagagggaaaaatagagactattggtatgttctccccatcagcgagttattgtaactggtcaccactggacgggaaggagaacagaggagagggaaagagaagcccaacctctgtgatcatatgagggccaaggctgagcagtgtagacagagaccctttgaaatgcatttgtctctcaaatagactagtaaacaccgacttctcctttgggttacaaacaccatttcaacctttcgggagagtcagagctaggatgtacaagaactgattctaaccagaagtccgcaagtactgtggacaagaatgcttaaccatgctgcttcagccttgagagacctaggttcttacacatatgcacacacgcatacacacatgcacgcacacacacatacacacatgcacgcacgcacgcatgcacaccaatttatgtttttattaagtgccttgaaaaaatgaagaaaaatgtattttccctttatgtaaaaattagtgaatatcttatgaattaaggcattcctctttccctaaccccgatggctccattcccaagtaccccaactcactgctgatcctattaaaggaatgagtcctgctacccgagtggtagtcatagccctagatgactctcaactactcttcaaagggaggcatcaggaatagaatgaaactgtgtgaaggataagattgttcgcatcaagatccaaatcttgatttcatattaacgcctaaggattgcctgtgtgctggaaatatatttgaaactcaaccagtatgcccagcctattgcatatcattgtcagaccatttttgctgctgtggtcacccacgatttcatttgtcttatacccaggtgaaaggggaagggtgaatgggactggctggttcctttaaatgttaacttatggaaatgctagttcaaatggtaatgtcacagtgttttgtatgcagagagcaagagttcaaccaacagctgtttattcatgtgtgtgtgtctttgctgctttgagttctctgtatctactgtgtatgtgaatggtcatgtgggactcagtggtggtgttgtgactttgacctagggtccgagtgtcacagctgatcttggcactcggcactcattggcacagtggtagttagaggtgaaaagtagagctgtcaagcccaagggcttagctttagggctcctcctgagttcggcccacagtagaagcaagattttaactagccccttttcctcttcaccctcccatgatgcgcagtgttcagaaagctggtaagtcctagggatttccagaagtagcctgcagaagaaggtaagtttgaaagccactccaggggtcctgatgctgtcatgctcagtgagccattttacagttctccaaagtctagccctgtttcggacctgcacttcacctctaagttatgtacaactcaacctgcatccctctaaaagtcctatatccatattcaccattggctaatttgaggccctgagtgggccttgaatgctaaaaagaagcagggtacgcagggctacatgtagataccacaccaaggctggaggctgstctgtcrtaagacagaaagaaagacgctgggcccaattttgacttggccaggggacaccttggtgtgtttgttatctttatctgtgggtaggctagctgacccatctccttgagtcattccctttgggaaaccccactgccagtattgatctcctttttgccttgtactgaatgacacattacctccacactctcccggactaggtggtcaacagggccacagggttgctttctgtctttggtggggcaggggagttgacagggatgagggtccaaggaataagcatgaatgacaagaaaacaagggaaagagttaacctgtcacatagcaggttaactttttcagggtttgcagttagaggtattcgaccattcactggctgagccagatcacgggaacttgagagcttttactgtgattcttcaatgtaaaaaataaacaacaatgtcaaactgtgtttatatgatttgtataaagcctttttaagattactatttaaataaacattataccagagaaaaaaaaaaaaaaaaaaaaaaaaaaaaaaaaaaaaaaagggcggccgc

SEQ ID NO: 2483 - DNA, 832 bp, Homo sapiens
  misc_feature (99)..(99): n equals a,t,g, or c
  misc_feature (105)..(106): n equals a,t,g, or c
gcacaccctgacctaaagacatagccccaaatcactttcaccatgtagggtctgagcctctttaaatccatattcccgtccatccagtgttgtgcaaantgaganngagtgtgctttggtccttccttggagtcagcgtcgcctgtggccccctccgttattgtctcgtggccttttgtgctaaactcggggcctctgctgtggagtaaagaatgtgggtttgtgtccctacctctgtcactgctggttctgcaacccaggacsattctcattctactatggtgatgcccctgayttcgttgacagcacacagacrtgacttcagagttccgtgcacatgtgtgcatcttctttcccttctctagagatgtttggcatcttcctcctgctgggttgcaacrcaggctgctacagcattctcttatcttcctttgcccttacacagactccaagcccacggtagagacgctgggacccactgtgaagagcgaagagacaaccamcccctamcccaccgaagaggaggccacagagtgtggggagaatgcagctttgaggatgacaaagattgcagtccttcgggattcaattgcaacttcgatttcctcgaggagcctgtggttggatgtatgaccatgccaagtggctccggacmacytgggccagmagctccagcccaaamgaccggasgtttccagatgacaggaatttcttgcggctgcagartgacagccagararagggccagtatgcccggctcatcagcccccctgtccacctgccccgaagcccggtgtgcatggagttccagtaccaggccacgggcggccgc

SEQ ID NO: 2484 - DNA, 836 bp, Homo sapiens
ccacgcgtccgcacaccctgacctaaagacatagccccaaatcactttcaccatgtagggtctgagcctctttaaatccatattcccgtccatccagtgttgtgcaaacatgagccagagtgtgctttggtccttccttggagtcagcgtcgcctgtggccccctccgttattgtctcgtggccttttgtgctaaactcggggcctctgctgtggagtaaagaatgtgggtttgtgtccctacctctgtcactgctggttctgcaacccaggaccattctcattctactatggtgatgcccctgacttcgttgacagcacacagacatgacttcagagttccgtgcacatgtgtgcatcttctttcccttctctagagatgtttggcatcttcctcctgctgggttgcaacacaggctgctacagcattctcttatcttcctttgcccttacacagactccaagcccacggtagagacgctgggacccactgtgaagagcgaagagacaaccaccccctaccccaccgaagaggaggccacagagtgtggggagaactgcagctttgaggatgacaaagatttgcagctccttcgggattcaattgcaacttcgatttcctcgaggagccctgtggttggatgtatgaccatgccaagtggctccggaccacctgggccagcagctccagcccaaacgaccggacgtttccagatgacaggaatttcttgcggctgcagagtgacagccagagagagggccagtatgcccggctcatcagcccccctgtccacctgccccgaagcccggtgtgcatggagttccagtaccaggcca

SEQ ID NO: 2485 - DNA, 997 bp, Homo sapiens
  misc_feature (887)..(887): n equals a,t,g, or c
  misc_feature (904)..(904): n equals a,t,g, or c
  misc_feature (979)..(979): n equals a,t,g, or c
  misc_feature (994)..(994): n equals a,t,g, or c
gcggccgcccttttttttttttttagatcagctcttcacccactgttttcctgtcatacacatggtgttcttaaaattgtaaatgaaaactcatttgaacttacattagtaacttctgttaaattatactggattgcttattaagtaagcattattatccacattaaatctgtcacagatgaaaaaattacacataaaggagactgcttgaggccccagggcatgctgtaatatacatagaggctcctgaatacttggttttccatgtggatctctgattttgctgaaagaagtctgtaaactgatgtagtcagacagctccccactggctacacatctctatagaatttagaagcattgtttatttcagcagaggtctggaatgaattttccttataatttaactcctgaaatgactgtttcaaaaggtcaactgtggtgaacttgcatatgtgacttgcagtcacagctaagtcacgatcccttagtttttccagaagtccactagaacgttagctccatggcactgttatcttgcatctccaggtcctgaaacagcccttagtgcatactaggtattcaataacttttttttgaataaatgttttatgtaaattccatcacaaatatggaagatcttagaggggatttttgaaaaccaaagaaagttgaaactccttcacatggagtttggatgttgaacttagaggcttgacttagccatttttaaaaaacgaaatgtgtgtgtatgtttatttaaggtaccttagtgacaggtacaacctacagcccaaagacaatgtacaaaacccaatgaggggacaagcctccactcttttataagatgcagaaatttgcaggagtctatcactcttactctaaccatnccaacagaccagaagcnctacaaatgacagaattatatgttgttgctttcatttgcatgtttcacactcatcagagaaccccggggccagtnaacctaaacaaaagnaag

SEQ ID NO: 2486 - DNA, 568 bp, Homo sapiens
  misc_feature (460)..(460): n equals a,t,g, or c
gggggattggagagttgaaagggttttcgggagcatctatttctctcagttctcctgctttgcctctggctactgcaggctgctgccttgcatttggtgaaagcctcgtgctttctaggaggggatttctttcagctttcctgccttacccccagtgtgtaatggggactgccttgcaatggatgaacctcacatgccttggagaatccctcttgcttctcctgccttgcttcctgtgctcagtgggctactttcttgtactttgggaagacctggtgtacctggggagggtatttctcagttctcctaccctggcaccagctttcagtgtacgactcccatccactcaatggaggctgggtgggtacagactagttctattcctggggtaccttgtgattctactctgttatgccaacccatatacaatcatccaaaatttgtttaaagataggctggnttctcccttcctcttctgtgctccttccaacatgtccctaggaacaaaagcagctgtgggactcttctctctaggaagagcttgatccttttggaaatgtagttaatt

SEQ ID NO: 2487 - DNA, 1523 bp, Homo sapiens
  misc_feature (1435)..(1435): n equals a,t,g, or c
  misc_feature (1450)..(1450): n equals a,t,g, or c
  misc_feature (1487)..(1487): n equals a,t,g, or c
ggactcttactgtttctcatggtgagaagacaatatttgctttctctttttcctttcttccggatgagaggctaagccataatagaaagaatggagaattattgattgaccgtctttattctgtgggctctgattctccaatgggaataccaagggatggttttccatactggaacccaaaggtaaagacactcaaggacagacatttttggcagagcatagatgaaaatggcaagttccctggctttccttctgctcaactttcatgtctccctcctcttggtccagctgctcactccttgctcagctcagttttctgtgcttggaccctctgggcccatcctggccatggtgggtgaagacgctgatctgccctgtcacctgttcccgaccatgagtgcagagaccatggagctgaagtgggtaagttccagcctaaggcaggtggtgaacgtgtatgcagatggaaaggaagtggaagacaggcagagtgcaccgtatcgagggagaacttcgattctgcgggatggcatcactgcagggaaggctgctctccgaatacacaacgtcacagcctctgacagtggaaagtacttgtgttatttccaagatggtgacttctatgaaaaagccctggtggagctgaaggttgcagcactgggttctaatcttcacgtcgaagtgaagggttatgaggatggagggatccatctggagtgcaggtccaccggctggtacccccaaccccaaatacagtggagcaacgccaagggagagaacatcccagctgtggaagcacctgtggttgcagatggagtgggcctatatgaagtagcagcatctgtgatcatgagaggcggctccggggagggtgtatcctgcatcatcagaaattccctcctcggcctggaaaagacagccagcatttccatcgcagaccccttcttcaggagcgcccagccctggatcgcagccctggcagggaccctgcctatcttgctgctgcttctcgccggagccagttacttcttgtggagacaacagaaggaaataactgctctgtccagtgagatagaaagtgagcaagagatgaaagaaatgggatatgctgcaacagagcgggaaataagcctaagagagagcctccaggaggaactcaagaggaaaaaaatccagtacttgactcgtggagaggagtcttcgtccgataccaataagtcagcctgatgctctaatggaaaaatggccctcttcaagcctggtgaggaaatgcttcagatgaggctccaccttgttaaataaattggatgtatggaaaaatagactgcagaaaaggggaactcatttagctcacgagtggtcgagtgaagattgaaaattaacctctgagggscagcacagcagstcaatgcctggtaatcctagcactttgggnagggttgaggagggngggtcacaaaggtcaagaggatcaaaggaccatcccnggcttaacaacgggggaaacccccgcttctttcttt

SEQ ID NO: 2488 - DNA, 1558 bp, Homo sapiens
ggcacgaggttttccatactggaacccaaaggtaaagacactcaaggacagacatttttggcagagcatagatgaaaatggcaagttccctggctttccttctgctcaactttcatgtctccctcctcttggtccagctgctcactccttgctcagctcagttttctgtgcttggaccctctgggcccatcctggccatggtgggtgaagacgctgatctgccctgtcacctgttcccgaccatgagtgcagagaccatggagctgaagtgggtaagttccagcctaaggcaggtggtgaacgtgtatgcagatggaaaggaagtggaagacaggcagagtgcaccgtatcgagggagaacttcgattctgcgggatggcatcactgcagggaaggctgctctccgaatacacaacgtcacagcctctgacagtggaaagtacttgtgttatttccaagatggtgacttctatgaaaaagccctggtggagctgaaggttgcagcactgggttctaatcttcacgtcgaagtgaagggttatgaggatggagggatccatctggagtgcaggtccaccggctggtacccccaaccccaaatacagtggagcaacgccaagggagagaacatcccagctgtggaagcacctgtggttgcagatggagtgggcctatatgaagtagcagcatctgtgatcatgagaggcggctccggggagggtgtatcctgcatcatcagaaattccctcctcggcctggaaaagacagccagcatttccatcgcagaccccttcttcaggagcgcccagccctggatcgcagccctggcagggaccctgcctatcttgctgctgcttctcgccggagccagttacttcttgtggagacaacagaaggaaataactgctctgtccagtgagatagaaagtgagcaagagatgaaagaaatgggatatgctgcaacagagcgggaaataagcctaagagagagcctccaggaggaactcaagaggaaaaaaatccagtacttgactcgtggagaggagtcttccgtccgataccaataagtcagcctgatgctctaatggaaaaatggccctcttcwagcctggtgaggaaatgcttcagatgaggctccaccttggttaaataaattggatgtatggaaaaatagactgcagaaaaggggaactcatttagctccgagtggtcgagtgaagattgaaaattaacctctgagggccagcacagcagctcatgcctgtaatcctagcactttgggaaggcttgaggagggcggrtcacaaggtcaggaggatcaaagaccatcctggctaacacggtggaaaccccgctctactaaaaatacaaaaaataaaaaattagccgggcatggtgacgggcacctgtaggtcccagctactcgggaggctgaggcaggaggaatggcatgaacccggaaggcagagcttgcagtgagccgagatcaacgccactgcactccagcctgggaggacaagagcgaagactctgtctcaagaaaaaaaaaaaaaaaaaa

SEQ ID NO: 2489 - DNA, 1572 bp, Homo sapiens
ctaagccataatagaaagaatggagaattattgattgaccgtctttattctgtgggctctgattctccaatgggaataccaagggatattatttttacagatggttttccatactggaacccaaaggtaaagacactcaaggacagacatttttggcagagcatagatgaaaatggcaagttccctggctttccttctgctcaactttcatgtctccctcctcttggtccagctgctcactccttgctcagctcagttttctgtgcttggaccctctgggcccatcctggccatggtgggtgaagacgctgatctgccctgtcacctgttcccgaccatgagtgcagagaccatggagctgaagtgggtaagttccagcctaaggcaggtggtgaacgtgtatgcagatggaaaggaagtggaagacaggcagagtgcaccgtatcgagggagaacttcgattctgcgggatggcatcactgcagggaaggctgctctccgaatacacaacgtcacagcctctgacagtggaaagtacttgtgttatttccaagatggtgacttctatgaaaaagccctggtggagctgaaggttgcagcactgggttctaatcttcacgtcgaagtgaagggttatgaggatggagggatccatctggagtgcaggtccaccggctggtacccccaaccccaaatacagtggagcaacgccaagggagagaacatcccagctgtggaagcacctgtggttgcagatggagtgggcctatatgaagtagcagcatctgtgatcatgagaggcggctccggggagggtgtatcctgcatcatcagaaattccctcctcggcctggaaaagacagccagcatttccatcgcagaccccttcttcaggagcgcccagccctggatcgcagccctggcagggaccctgcctatcttgctgctgcttctcgccggagccagttacttcttgtggagacaacagaaggaaataactgctctgtccagtgagatagaaagtgagcaagagatgaaagaaatgggatatgctgcaacagagcgggaaataagcctaagagagagcctccaggaggaactcaagagaaaaaaaatccagtacttgactcgtggagaggagtcttcgtccgataccaataagtcagcctgatgctctaatggaaaaatggccctcttcaagcctgggcctcccattggccaaacacagcagcaaaccagaggacaagggagcccagtggcactgtccatagaggacagattcctggggtccagaagagggtggagaaagctgaaggctggagagtgaatctagggcatataaggccccacacagagcccagcacagagacggccttgcagctatcaggaagatgaggagcttccttcatggcctgctgtgggctgagtaaataatatgattgccttctacagcgctagagattcatatgtttatccccatttttcaggtgaggaaatgcttcagatgaggctccaccttgttaaataaattggatgtatggaaaaatagactgcaaaaaaaaaaaaaaaaaa

SEQ ID NO: 2490 - DNA, 1461 bp, Homo sapiens; identical to SEQ ID NO: 913
  misc_feature (1447)..(1447): n equals a,t,g, or c
  misc_feature (1450)..(1450): n equals a,t,g, or c
  misc_feature (1459)..(1459): n equals a,t,g, or c

SEQ ID NO: 2491 - DNA, 2010 bp, Homo sapiens
ttttttttttttttttttttttttttttttgcacaacaagttgcatttattgtttctgacaagtgcatagtaattttcagtttgctcatgttcctagcatcacaaatctgagttacaattttgcttctcaatgaaaaacatatactctgaaaagtgattaggaagttctaaaaattttaatcatttatagagtatcttaaaaatccttatcaagtaagatattaactttacctttataaatctttgtgtgaaatgaaaaaaaaatcaaggcatacaaatttcattgtgttctacatttttaaataccatcctttgtctccgttaaaagattttcatccatttattcaaaaaccttttaagttcaactgtccaatttaagacagagtgaagacatttttgagtatctgaactaagcattgtcttgactgaaacgaagtaagaactcaatgagagtccttgtgggcctcccagtcatgcctttccgtagatagggaacttcatctttgttggtcatcacgcctgctatgtctaaatgtgcccacttaggatgagttacgaattctttcaggaatgctgcagctgtacatgctcctgcagatctgtattttccaatgttgttaacatcagcaagctggcaatctacaacctgtcttgtataatgttcgaagagaggcatcctccagacacggtcccctgtttcaatgctggcctcgaagagtttgttccagagccaggatgaattggtaaagaccccagtggcacctgatcccaaagctacatccatggcacctgttaaggtggcggcattgaggatgaccttcgggttaaacgtgtgtgcgtaacagagcgcatcagccagtatgagcctcccctcagcatcagtgttatcaacctggatggtcttcccgtttttggctctaacaacatcccccggcttgttggccttgccgctgggcatattttcacaaagaggggccagacctataatattaatgggcaaattaagctttgcagcagacacgatggctgagcatatagttgcagctcctcccatgtcagccctcatgaggtccatatttgcagaagccttgatggagataccaccactgtcaaaggtaattcctttcccaacaaacaccaggggtggttcgtttgcattggggctgcctttgtagtgaatttccaagaagactgggggctcgtcagatcctttggccacactgaggaatgatcccattgcctgttcctcaatccaagacttgggtctgatatggacctcggttttactactagcacttttgagattcttctcaataatttcrgcaaatctggttggcgtcatctcattggctggcgtctccatcaattggcgtgccaagttctgcccagaagcaaacaggactcctttctgccaggcctcctgatccccacttccatagagctttgccgacacagccatcttctttttttgctttaggtcatcgtattcatagagaccaagcaccgctccctccgcagcagcctgagcgtctccacagggatccacctccacagacgagagctccaggtcttgaatctgcctgcaccccgctgcaacagcagctctgatgttttctttgccttcatgccagttttcctgttcgtcgattccagctgcctttttgccgaggccaactagcaccacgctggggaagtcctgatgcagaccataaaaggttcgagtcttccctgccttcagaggtggtccagatatgttcaaagtctctctcagctttccagctaacaatttatcaaaattctctcctgcacttgtgaactgtggcacatcatcttctttttctttggaatagattcctaaaacaaggcccttcgtcatgtctgcggtggagagactccggctcccgaaacgtctcacggccagacgtcggacgactactcgccccgcagccggaagaggcagcaagaacatcttgtcggctcggcccctcgcaccgccctccagcgagcacc

SEQ ID NO: 2492 - DNA, 632 bp, Homo sapiens
gcccggttctwagaactaktgatcccccgggctscaggaattcggcacgagcggcggccgcggcgcgtgcgtctgtgcctctgcgcgggtctcctggtccttctgccatcatgccgatgttcatcgtaaacaccaacgtgccccgcgcctccgtgccggacgggttcctctccgagctcacccagcagctggcgcaggccaccggcaagcccccccagtacatcgcggtgcacgtggtcccggaccagctcatggccttcggcggctccagcgagccgtgcgcgctctgcagcctgcacagcatcggcaagatcggcggcgcgcagaaccgctcctacagcaagctgctgtgcggcctgctggccgagcgcctgcgcatcagcccggacagggtctacatcaactattacgacatgaacgcggccaatgtgggctggaacaactccaccttcgcctaagagccgcagggacccacgctgtctgcgctggctccacccgggaacccgccgcacgctgtgttctaggcccgcccaccccaaccttctggtggggagaaataaacggtttagagactaaaaaaaaaaaaaaagggcggccgctcgcgatctagaacttagtccggacgcgtgggt

SEQ ID NO: 2493 - DNA, 923 bp, Homo sapiens
  misc_feature (6)..(6): n equals a,t,g, or c
  misc_feature (908)..(908): n equals a,t,g, or c
aacggnaaaatctccccttactattgggaacaaaagctggagctccaccgcggtggcggccgctctagaactagtggatcccccgggctgcaggaattcggcacgagccgaggaagagcgttttggggacgggggctggtgaggctcacgttggagggcttcgcgtctgcttcggagaccgtaaggatattgatgaccatgagatccctgctcagaacccccttcctgtgtggcctgctctgggccttttgtgccccaggcgccagggctgaggagcctgcagccagcttctcccaacccggcagcatgggcctggataagaacacagtgcacgaccaagagcatatcatggagcatctagaaggtgtcatcaacaaaccagaggcggagatgtcgccacaagaattgcagctccattacttcaaaatgcatgattatgatggcaataatttgcttgatggcttagaactctccacagccatcactcatgtccataaggaggaagggagtgaacaggcaccactaatgagtgaagatgaactgattaacataatagatggtgttttgagagatgatgacaagaacaatgatggatacattgactatgctgaatttgcaaaatcactgcagtagatgttatttggccatctcctggttatatacaaatgtgacccgtgataatgtgattgaacactttagtaatgcaaaataactcatttccaactactgctgcagcattttggtaaaaacctgtagcgattcgttacactggggtgagaagagataagagaaatgaaagagaagagaaatgggacatctaatagtccctaagtgctattaaataccttattggacaaggcaaaaaaaaaaaaaaaaaactcgagsgggggcccggtacccaattcggngtatgtgccgttggt

SEQ ID NO: 2494 - DNA, 781 bp, Homo sapiens
ggcacgagccgaggaagagcgttttggggacgggggctggtgaggctcacgttggagggcttcgcgtctgcttcggagaccgtaaggatattgatgaccatgagatccctgctcagaacccccttcctgtgtggcctgctctgggccttttgtgccccaggcgccagggctgaggagcctgcagccagcttctcccaacccggcagcatgggcctggataagaacacagtgcacgaccaagagcatatcatggagcatctagaaggtgtcatcaacaaaccagaggcggagatgtcgccacaagaattgcagctccattacttcaaaatgcatgattatgatggcaataatttgcttgatggcttagaactctccacagccatcactcatgtccataaggaggaagggagtgaacaggcaccactaatgagtgaagatgaactgattaacataatagatggtgttttgagagatgatgacaagaacaatgatggatacattgactatgctgaatttgcaaaatcactgcagtagatggtatttggccatctcctggttatatacaaatgtgacccgtgataatgtgattgaacactttagtaatgcaaaataactcatttccaactactgctgcagcattttggtaaaaacctgtagcgattcgttacactggggtgagaagagataagagaaatgaaagagaagagaaatgggacatctaatagtccctaagtgctattaaataccttattggacaaggaaaaaaaaaaaaaaaaaagcg

SEQ ID NO: 2495 - DNA, 2223 bp, Homo sapiens
  misc_feature (986)..(986): n equals a,t,g, or c
atttatatcttttcaccacttgaatatactgcaatgtgtagtgagtaaattgtctccctttttctatagatcattaggttagagtttttttcttcttttttttttttttttttttttaccacttctgctgttcatggtagtagtggaaggtaaatttggaaatggcattgacataaaatgaaaatgtttacggacacttttcttttttgcttttttattgtatttggataaagatccacttaaaagttatctgttttttcctgtttttttttttttttccccaaagtgtagttatgttttcactattgctgcttctatagagggcattgtgatagagagttacagatgaaacattaaatgccacagtgagtagaaataattactacaaaaagtaataaatatgattacttggtaatatcattctccatctaaaatactagtttcacctgtgagcagatttcagctcagtttatagttaaaaacaatgagggtaaaatgggattcatgctcagggaatgaatcagccatagttagagtgggaaattattattttcttcatttaaaggtagattttatgtttatttccctaaattgcataagataaaattgtctgtttaataaaaagacatttattaccattattaacagtcattttagagccaaatttaagaaaaggatattgaaagggtctttattggccttgtttgggtaactctatgctgttagatagaagagacttaggtaaataactttttatgtctgaggtgagtacacaatattggttcttggaaaaatagctgtttcttcataagatacccaagtgataattttttttcccctagactgtcaggcctatgagtaaatactaaatckattagctgtcyccactcataaaccaaaccaaaccaatacaaacagatgaggagaggaaatgtmgtwaaaatactggckgggtcttatgattgggatgagtgattttataagantaatwtggkgataattttattctaggattttatttttggcctaatataggaatgtttaaaaaaggcttttctatgaaaattagaaatttatacttgaaattaaaagtctagaagggggaggaccttaaagctaagctaccagtaagacaatgaataattcagaagagaacactattcttttactgactgagtgcccaagatgccaatttccatgaagtcttgatttatatatatgtacacatgttatgcacatacatgtttgttttctaacagttattttttaagcttttgagataattttagacttacagaagagttgtaaaagtagtagagttcttgtatactctgcacccaccttgcccttatgttaacatcttacgtaacaatagaacatttgtcaaaattaagaaattaaccttgatataatactaactaaagtagaaagtttaaaaagtagagattttagtcttttcactaatgtccttttactgttccaagacccagccttgcatttagctrtcatgcctacgtcctgtcttccagtctgtgacagtgtatcataacaggggatacctgatgttgtaatgtatttctggtgttgktaaccttgatcactatgctaaggtggtgtctgctaggattcgctactgtaaacttactgtgttttccttgtaattattgaatatttgctggagatacccggagactatgcaaatgtcccgtttctgcttaaacttttgctcattttactatccattggcagatcttgcttgtggcagttactactgtggtgttctaatggtgattttctatttctctcaatccttctacatttattattggaattcttctgtaaggaagagttgtcagttctggatttatatttttaactataataagatattcaggataagtatagatttagaacttaaagatgttaaatcatgttaaaattattccaaataccaatatcaaagaaaactaagttggtaatctatctcagaaaatatatgaacttaagaaggaaaatagtatttatgatttgtagaattggttcaacttttgacttaatactgactttggactgaattcaaagttttcttgaaatttcacatctggactttttaaagtgtctacatttatattactttggggatcattttgtcaaagtcttgaataaagttacccagtcctggcatgataaamaaaaaaaaaaaaaaaaaaaagggcggccgct

SEQ ID NO: 2496 - DNA, 1093 bp, Homo sapiens
aagctaccagtaagacaatgaataattcagaagagaacactattcttttactgactgagtgcccaagatgccaatttccatgaagtcttgatttatatatatgtacacatgttatgcacatacatgtttgttttctaacagttattttttaagcttttgagataattttagacttacagaagagttgtaaaagtagtagagttcttgtatactctgcacccaccttgcccttatgttaacatcttacgtaacaatagaacatttgtcaaaattaagaaattaaccttgatataatactaactaaagtagaaagtttaaaaagtagagattttagtcttttcactaatgtccttttactgttccaagacccagccttgcatttagctatcatgcctacgtcctgtcttccagtctgtgacagtgtatcataacaggggatacctgatgttgtaatgtatttctggtgttgttaaccttgatcactatgctaaggtggtgtctgctaggattcgctactgtaaacttactgtgttttccttgtaattattgaatatttgctggagatacccggagactatgcaaatgtcccgtttctgcttaaacttttgctcattttactatccattggcagatcttgcttgtggcagttactactgtggtgttctaatggtgattttctatttctctcaatccttctacatttattattggaattcttctgtaaggaagagttgtcagttctggatttatatttttaactataataagatattcaggataagtatagatttagaacttaaagatgttaaatcatgttaaaattattccaaataccaatatcaaagaaaactaagttggtaatctatctcagaaaatatatgaacttaagaaggaaaatagtatttatgatttgtagaattggttcaacttttgacttaatactgactttggactgaattcaaagttttcttgaaatttcacatctggactttttaaagtgtctacatttatattactttggggatcattttgtcaaagtcttgaataaagttacccagtcctggcatgataaaaaaaaaaaaaaaaaaaaaaa

SEQ ID NO: 2497 - DNA, 1393 bp, Homo sapiens
  misc_feature (21)..(21): n equals a,t,g, or c
gtaagaacactctcgtgagtnctaacggtcttccggatgaaggctatttgaagtcgccataacctggtcagaagtgtgcctgtcggcggggagagaggcaatatcaaggttttaaatctcggagaaatggctttcgtttgcttggctatcggatgcttatatacctttctgataagcacaacatttggctgtacttcatcttcagacaccgagataaaagttaaccctcctcaggattttgagatagtggatcccggatacttaggttatctctatttgcaatggcaacccccactgtctctggatcattttaaggaatgcacagtggaatatgaactaaaataccgaaacattggtagtgaaacatggaagaccatcattactaagaatctacattacaaagatgggtttggatctttaacaagggcattgaagcgaagatacacacgcttttaccatggcaatgcacaaatggatcagaagttcaaagttcctgggcagaaactacttattggatatcaccacaaggaattccagaaactaaagttcaggatatggattgcgtatattacaattggcaatatttactctgttcttggaaacctggcataggtgtacttcttgataccaattacaacttgttttactggtatgagggcttggatcatgcattacagtgtgttgattacatcaaggctgatggacaaaatataggatgcagatttccctatttggaggcatcagactataaagatttctatatttgtgttaatggatcatcagagaacaagcctatcagatccagttatttcacttttcagcttcaaaatatagttaaacctttgccgccagtctatcttacttttactcgggagagttcatgtgaaattaagctgaaatggagcatacctttgggacctattccagcaaggtgttttgattatgaaattgagatcagagaagatgatactaccttggtgactgctacagttgaaaatgaaacatacaccttgaaaacaacaaatgaaacccgacaattatgctttgtagtaagaagcaaagtgaatatttattgctcagatgacggaatttggagtgagtggagtgataaacaatgctgggaaggtgaagacctatcgaagaaaactttgctacgtttctggctaccatttggtttcatcttaatattagttatatttgtaaccggtctgcttttgcgtaagccaaacacctacccaaaaatgattccagaatttttctgtgatacatgaagactttccatatcaagagacatggtattgactcaacagtttccagtcatggccaaatgttcaatatgagtctcaataaactgaatttttcttgcgaaaaaaaaaaaaaaaaaaaaaaaaaa

SEQ ID NO: 2498 - DNA, 617 bp, Homo sapiens
  misc_feature (430)..(430): n equals a,t,g, or c
  misc_feature (569)..(569): n equals a,t,g, or c
ggcagagcttttctctccatggatctttgctcatgctagtgtgcagtctggaatttgtgtctttccttctccagctttggttttctcttttagcaaagctcatttctaatatttcttcttccacaaagtcatctctgacccccagagtgtttaatctctcctttctctgtacttaaagcaatgtctgtgtattatttctatcatatgttttttttttttttttgttttgttttgtttttgagacagagtctcgctctgtcgcccaggctggagtgcagtggcgcgatctcggctcactgcaagctccgcctcccgggttcacgccattctcctgcctcagcctcccgagtagctgggactacaggcgcccgctaccacgcccggctaattttttgtawttttggtggaracggggtttcaccgtgttggncaggatggtctcgatctcctgacctcgtgatccgcccgcctcggcctcccaaagkgctgggattacaggsgtgagccaccgsgsccggccwatcatatgttttacctctagatatttgtgtctaaattataattgcatncagttaattctaaagggaaaaataaatttttactttacacaaaggcta

SEQ ID NO: 2499 - DNA, 489 bp, Homo sapiens
  misc_feature (479)..(479): n equals a,t,g, or c
agcttgaaagtctagcttagaggtttatttgaacacagagtatgcatattattagatacttgttgggttcaaattaaatcagctgatagttatctctcttctttaacacatcatctaattcctgtgattccacaattcctcctggktaaaaggacacaaagttcatgataatatttgcaaatgtaaaatactctgaaaagagatatgtgattataaatgtcctgttaaccctcaaagccaaaatgtaggaagttaaaatgaagcttgtaggtccaggatcagtcaacctagtcttctacatcaatataagaacactgccacacttcagatttgtataatcttcacacttaaatatccaggttcagaaaaaataacattcaggaagagagtcagaaacgtctgctacgataaagcttgtaactacttctactacctcctcctacaacatcactttcactccaggtagattttgcttatanttaccagaga

SEQ ID NO: 2500 - DNA, 777 bp, Homo sapiens
  misc_feature (274)..(274): n equals a,t,g, or c
  misc_feature (278)..(278): n equals a,t,g, or c
  misc_feature (295)..(295): n equals a,t,g, or c
  misc_feature (676)..(676): n equals a,t,g, or c
ggcagagctcaggtaagargcaaaattactagaatattcactctcactgaaaatgagtaaaaacctaacttagatgaaaatccttatcttgttcatttttattcctggccttttggttgagaagaatgggccagaccatgtgtgtgtgtgtatgtgtgtgcgtgtgtgtgtgtgtgcgcacttgggtttatttatatgagccggtaaaatttcgttcaccattaatttatgttaatttaccaacttcttaaatgagaacagtgagaattttctncatngttaataatacactggncagtgcatatatgcatcacgaagagaggattttcccattgataatagatttccaaatacatcttcctgctttaagattttaatatatggatttatatataaaaactagttaagtcattggaaaagcaaactgtcatccttctcttatttgagatctcaactttagaaagtctatgttctcaactacagaaaataatttttagaccagctaactttcagatttctgcagtgcttattttctcccagttgagggttggtttttktttgtttgtttgtttgtttgtttttcctgattaaaaagtaagaatacggccaggcgcgatagctcatgcctttaatcccagcattttgggaggccgaggagggcagatcacctgaggtncaggagttcgagaccagcctggctaacatggtgaaacccagtttctactaaaaaaaaaaaaaaaaaacttcgagggggggtcccggtacctaatcgtccct

SEQ ID NO: 2501 - DNA, 838 bp, Homo sapiens
  misc_feature (171)..(171): n equals a,t,g, or c
  misc_feature (752)..(752): n equals a,t,g, or c
tatctttgcgcccttgaaacttctgcctgtgggtgtggtggcagcaggtaaacaggttctgttgacattttaaaaggcatagtctcaagatgcaggtgtgatttgtttggagcatgtcatctgagcaggaattttacagaaattggaaaaagaagaataaatggcgatttntcagctaatcatgtcccagatcaagagctgtgtccactctgcctcctggactgtcatgcatttagwacttgcaagccttwacttctcwamtkgtatttttcctccctaatgagttwaactactttttaaaattcttatgatagtcaagggtctctgaaaaatatttccttcctacataccagatctttctctacattctctacatcatagctttttatgtgccatgcagaattctcaccgattataaattaatctgcaatattaaaaatgttctcttgtggctgtgaaacaggaggtgtggatactcaaggtttctattagggaaaggtgggggtcctcagtaaagatggagaacatgtaatgktgaggttccatctgtgwtctccattggctttatgcagaacaggattttcaaaatgcttatttaaacaggatggsatttatcacccagaaagttctaaaaaataatatatattaggaggtacctgttctctagagtgctaaaaaaagactactttaaatcactactaaaaattatagaacacttgactgggtgcagtggctcacacctgtaatcttancactttgggaggccgtggtgggtggataacttgaggtcaggagttcaaaacctgctgaccaacatggtgaaaccccatctctacta

SEQ ID NO: 2502 - DNA, 1515 bp, Homo sapiens
  misc_feature (349)..(349): n equals a,t,g, or c
  misc_feature (355)..(355): n equals a,t,g, or c
  misc_feature (1198)..(1199): n equals a,t,g, or c
ctttggtaacatgacttttttttttctaccgcttttcagctgagttgtggagtaggcagaactttattatctgacctgggaagctaaccactatgtgatactgttttctgaggaaaatatgttagattccacatggtaacttgacaaacaaacttgaaacatggctgtttgaaagctgagatggtttgtgagaaacattgtgaggcagtgtggcgtgattaattgtcagataacaccagtaagtacctttgagtttaggggaagaagtgattagtggctagagaggtctgagaaggttccactgaggcaatgaaactagctagttcttaaaagtagggtggcatatagnaagagnaaaacagagtttctaggcatgggagaagggcaaatatgtrattctcagctgaggctgtatcttttaaaatgttttgaaaatacctttgtacagaaagcaacactggccacacctaagaaagcgatgcttccactccccctccttgccctcacttctctttcccctctcacacagtccctttctctcaaagccattccccatgtctccacctcaatggcctgtggtagtttagagcaggggtccccaacccctgggccatggaccactaccgtggcctgttaggaacctggcccacagccagaggtaagtgacaggcgagctctgcctcctttgatgtaagcagtggcattagattctcataggagcacaaaccctactgtgaactgcacatgtgagggatctaggttgcatgctccttatgagaatctaaatataaatgtgatgcacttgattcatccagaaaccatcccctccatccccatccatggaaaaattgtctttcatgaaaccagtccctggtgccagaaaggttagggaccactggcttacaggagaaatgaatggttgagatatcatggatgggagtagcctgcacttgwaaatagtgtagaggcagaaaaaaaggttgggaaaaccttgaactagatagagatcaggagaagccagcattgtttatgttactcttctgcttaaagsccaattttagatatttccttggggattttagttatttcctgtgcctttgcaggttctaaaatgattcttttcagacttagagtcaaagtagctaaagaatattaaattmwggmtggttgcagtggctcasgcckgtaatcccagcannacgggaggccgaggtgggcagatcacgaggtcaagagatcgagaccatctggcaaacatggtgaaaccctgtctctactaaaaatacaaaaaattagctggatgtgctggtacgtgcctgtagtcccagctacttgggaggctgaggcaggaggattgcttgaatccgagaggcagaggttgtagtgagctgagattccatgccactgcactccagcctggcgacagagtgagattctgtctcaaaaaaaaaaaaaaaaaaaaaaactcgagggggggcccggtacccaattcgccctaatagggatcgtattaca

SEQ ID NO: 2503 - DNA, 413 bp, Homo sapiens
  misc_feature (1)..(1): n equals a,t,g, or c
  misc_feature (403)..(403): n equals a,t,g, or c
  misc_feature (409)..(409): n equals a,t,g, or c
  misc_feature (413)..(413): n equals a,t,g, or c
natcccagaaccctcccctccatccccatccatggaaaaattgtctttcatgaaaccagtccctggtgccagaaaggttagggaccactggcttacaggagaaatgaatggttgagatatcatggatgggagtagcctgcacttgtaaatagtgtagaggcagaaaaaaaggttgggaaaaccttgaactagatagagatcaggagaagccagcattgtttatgttactcttctgcttaaaggccaattttagatatttccttggggattttagttatttcctgtgcctttgcaggttctaaaatgattcttttcagacttagagtcaaagtagctaaagaatattaaattctggctggttgcagtggctcaggcctgtaatccctttttctaaaggaagccnaaaggngcan

SEQ ID NO: 2504 - DNA, 1160 bp, Homo sapiens
  misc_feature (12)..(12): n equals a,t,g, or c
  misc_feature (25)..(25): n equals a,t,g, or c
  misc_feature (64)..(64): n equals a,t,g, or c
  misc_feature (981)..(981): n equals a,t,g, or c
taaacgccaaangcttgggaaaatnaaaaccttcaattaaagggggaacaaaaagctggggagntcccaccggcgggtggcggcccgcttctaggaaactagtggaatcccccggggctgcaagggaattcggcacggagctcggcctcccaaagtgttgggattataggcctgagccactgcacccagcccttgtttttttatttttaagctttgccaacatctgagttccccgacaatcgtgttcttaattcttgttaatatgttattagagttagaaaggattccttcttatattgcagataaaagaaggaaatgtgtagaaggtttttttttcttttttttctttttttgcccttttttttgtgcctcaaatctgaaggccttttatgtatagattgtactaggacctgcagatctagtgtctttactcatcataggtaacaattggatttagcgagaaaatataggtatttctgtttttgagtttcgttaacagcaaattgtttagatgggattaaaggcccaaaatgtactctagttatctttgtggaacccatggatgaacacctatatatatagagagagagtgtgtgtgtgtatgtatatgtatgtacgtgtgtatactcaccgttggactcaaactcaggtaattctactgcctcagcttcttgagtaggggggattacaagtgtgtgccactgtgcctartttatgttgtgttttartggtgttaaatcttgtgtaccaggtcagaataattgttttagttggaggagctaagttgaaataagtatttggttatcataagttacagttcataagcactttaaaaataaccccttttcttcaattaactatatattggcttggtgtgttggctcacacctgtaattctaacactttgagagccraggtgggtggattgcttgagcttaggagtttgaaacccccctgggcaacatggcaaaacttcgtctntaccaaaaatacaaaaattacctgggcatggtggtatgtgcctctggtcccagccactcaggaggctgaggtgggtggattgcttgagtccgtgaggtggaggctgcagtgagtggagatcgcaccactccactccagcctgggtgacagagtgagatcttgcctcaaaaaaaaaaaaa

SEQ ID NO: 2505 - DNA, 1037 bp, Homo sapiens
ggcacgagctcggcctcccaaagtgttgggattataggcctgagccactgcacccagcccttgtttttttatttttaagctttgccaacatctgagttccccgacaatcgtgttcttaattcttgttaatatgttattagagttagaaaggattccttcttatattgcagataaaagaaggaaatgtgtagaaggtttttttttcttttttttctttttttgcccttttttttgtgcctcaaatctgaaggccttttatgtatagattgtactaggacctgcagatctagtgtctttactcatcataggtaacaattggatttagcgagaaaatataggtatttctgtttttgagtttcgttaacagcaaattgtttagatgggattaaaggcccaaaatgtactctagttatctttgtggaacccatggatgaacacctatatatatagagagagagtgtgtgtgtgtatgtatatgtatgtacgtgtgtatactcaccgttggactcaaactcaggtaattctactgcctcagcttcttgagtaggggggattacaagtgtgtgccactgtgcctagtttatgttgtgttttagtggtgttaaatcttgtgtaccaggtcagaataattgttttagttggaggagctaagttgaaataagtatttggttatcataagttacagttcataagcactttaaaaataaccccttttcttcaattaactatatattggcttggtgtgttggctcacacctgtaattctaacactttgagaggccaaggtgggtggattgcttgagcttaggagtttgaaacccccctgggcaacatggcaaaacttcgtcttaccaaaaatacaaaaattacctgggcatggtggtatgtgcctctggtcccagccactcaggaggctgaggtgggtggattgcttgagtccgtgaggtggaggctgcagtgagtggagatcgcaccactccactccagcctgggtgacagagtgagatcttgcctcaaaaaaaaaaaaaaaaaaaaaa

SEQ ID NO: 2506 - DNA, 829 bp, Homo sapiens
  misc_feature (769)..(769): n equals a,t,g, or c
  misc_feature (778)..(778): n equals a,t,g, or c
  misc_feature (804)..(804): n equals a,t,g, or c
  misc_feature (829)..(829): n equals a,t,g, or c
gtatccgtttctccagctatttgattactcggatcgtgtagacatgcccgagtacatgatggcacttctagttgcaatgttccactcaggctgtagagggattgccaagaaacaaatccgatttccaggatcttgtgacttaaacaagcgaggcagatggctcttgtgctccataaaaatgtgtgttttcatttggctcattactgtagaagcttccctcttgtktttttttttaagttgtctgagtcatagcttgaggacccatgccaactttgtttgaaagtgaagacaccatgaattttaagtatccagacaaaagattttttgttctacgctgaagttgawtttgtttggtagagtgtaaggctttgctggccacttttatagctaacctgtaccttttccctttcttcttctcctgaaggttgcttcagttattaacatcaaccccaatacaactcactccacaggcagctgccgttctcacactgctctacttagactcaatagcagcaccattaagtatctagactttgtctttgctgtggtgagtaacagattttttaaagttaggttcattctcttagaaacacatctgaaagtctaaatagttgcatggggggaggggggtatttagctttattttccagttstacagtactcaattataaagtgtagtccattcatccctgttcatccctcagagtctgtgcaatggtctgtggactggactcttgcattaatgttcaccaagagtggccatttaccntagagagantttagggtaggaggcaaggatttaantcacatcaaaaaaaaaaaaaaaaan

SEQ ID NO: 2507 - DNA, 872 bp, Homo sapiens
cccccgggctgcaggaattcggcacgagtatccgtttctccagctatttgattactcggatcgtgtagacatgcccgagtacatgatggcacttctagttgcaatgttccactcaggctgtagagggattgccaagaaacaaatccgatttccaggatcttgtgacttaaacaagcgaggcagatggctcttgtgctccataaaaatgtgtgttttcatttggctcattactgtagaagcttccctcttgtttttttttttaagttgtctgagtcatagcttgaggacccatgccaactttgtttgaaagtgaagacaccatgaattttaagtatccagacaaaagattttttgttctacgctgaagttgattttgtttggtagagtgtaaggctttgctggccacttttatagctaacctgtaccttttccctttcttcttctcctgaaggttgcttcagttattaacatcaaccccaatacaactcactccacaggcagctgccgttctcacactgctctacttagactcaatagcagcaccattaagtatctagactttgtctttgctgtggtgagtaacagattttttaaagttaggttcattctcttagaaacacatctgaaagtctaaatagttgcatggggggaggggggtatttagctttattttccagttctacagtactcaattataaagtgtagtccattcatccctgttcatccctcagagtctgtgcaatggtctgtggactggactcttgcattaatgttcaccaagagtggccattttaccattagagagactctagggtagaagcaagaattaactcacatcaaaaaaaaaaaaaaaaaactcgaggggggggccg

SEQ ID NO: 2508 - DNA, 987 bp, Homo sapiens; identical to SEQ ID NO: 1354
  misc_feature (31)..(31): n equals a,t,g, or c
  misc_feature (41)..(41): n equals a,t,g, or c
  misc_feature (971)..(971): n equals a,t,g, or c

SEQ ID NO: 2509 - DNA, 1767 bp, Homo sapiens
  misc_feature (1737)..(1737): n equals a,t,g, or c
  misc_feature (1748)..(1749): n equals a,t,g, or c
  misc_feature (1760)..(1760): n equals a,t,g, or c
ctgctgggccctgaaattttactcagcagtttgaaatcaagacatagcttttctcattcaccctcccacttggggctaatgcacagacatgaacatctattgaggaaaaccacaaaaaacttcaaaacagctacaacgggaaaaagagagttttgtcccacagtcagcaggccactagtttattaacttccagtcaccttgatttttgctaaaatgaagactctgcagtctacacttctcctgttactgcttgtgcctctgataaagccagcaccaccaacccagcaggactcacgcattatctatgattatggaacagataattttgaagaatccatatttagccaagattatgaggataaatacctggatggaaaaaatattaaggaaaaagaaactgtgataatacccaatgagaaaagtcttcaattacaaaaagatgaggcaataacaccattacctcccaagaaagaaaatgatgaaatgcccacgtgtctgctgtgtgtttgtttaagtggctctgtatactgtgaagaagttgacattgatgctgtaccacccttaccaaaggaatcagcctatctttacgcacgattcaacaaaattaaaaagctgactgccaaagattttgcagacatacctaacttaagaagactcgattttacaggaaatttgatagaagatatagaagatggtactttttcaaaactttctctgttagaagaactttcacttgctgaaaatcaactactaaaacttccagttcttcctcccaagctcactttatttaatgcaaaatacaacaaaatcaagagtaggggaatcaaagcaaatgcattcaaaaaactgaataacctcaccttcctctacttggaccataatgccctggaatccgtgcctcttaatttaccagaaagtctacgtgtaattcatcttcagttcaacaacatagcttcaattacagatgacacattctgcaaggctaatgacaccagttacatccgggaccgcattgaagagatacgcctggagggcaatccaatcgtcctgggaaagcatccaaacagttttatttgcttaaaaagattaccgatagggtcatacttttaacctctattggtacaacatataaatgaaagtacacctacactaatagtctgtctcaacaatgwgtaaaggaacttaagtattggtttaatattaaccttgtatctcattttgaaggaatttaatattttaagcaaggatgttcaaaatcttacatataataagtaaaaagtaagactgaatgtctacgttcgaaacaaagtaatatgaaaatatttaaacagcattacaaaatcctagtttatactagactaccatttaaaaatcatgtttttatataaatgcccaaatttgagatgcattattcctattactaatgatgtaagtacgaggataaatccaagaaactttcaactctttgcctttcctggcctttactggatcccaaaagcatttaaggtacatgttccaaaaactttgaaaagctaaatgtttcccatgatcgctcattcttcttttatgattcatacgttattccttataaagtaagaactttgttttcctcctatcaaggcagctattttattaaatttttcacttagtctgagaaatagcagatagtctcatatttaggaaaactttccaaataaaataaatgttattctctgataaagakyttaaaattttggnacaaagggggnnggggtcccaanatatgca

SEQ ID NO: 2510 - DNA, 1599 bp, Homo sapiens
ggcacgaggttttgtcccacagtcagcaggccactagtttattaacttccagtcaccttgatttttgctaaaatgaagactctgcagtctacacttctcctgttactgcttgtgcctctgataaagccagcaccaccaacccagcaggactcacgcattatctatgattatggaacagataattttgaagaatccatatttagccaagattatgaggataaatacctggatggaaaaaatattaaggaaaaagaaactgtgataatacccaatgagaaaagtcttcaattacaaaaagatgaggcaataacaccattacctcccaagaaagaaaatgatgaaatgcccacgtgtctgctgtgtgtttgtttaagtggctctgtatactgtgaagaagttgacattgatgctgtaccacccttaccaaaggaatcagcctatctttacgcacgattcaacaaaattaaaaagctgactgccaaagattttgcagacatacctaacttaagaagactcgattttacaggaaatttgatagaagatatagaagatggtactttttcaaaactttctctgttagaagaactttcacttgctgaaaatcaactactaaaacttccagttcttcctcccaagctcactttatttaatgcaaaatacaacaaaatcaagagtaggggaatcaaagcaaatgcattcaaaaaactgaataacctcaccttcctctacttggaccataatgccctggaatccgtgcctcttaatttaccagaaagtctacgtgtaattcatcttcagttcaacaacatagcttcaattacagatgacacattctgcaaggctaatgacaccagttacatccgggaccgcattgaagagatacgcctggagggcaatccaatcgtcctgggaaagcatccaaacagttttatttgcttaaaaagattaccgatagggtcatacttttaacctctattggtacaacatataaatgaaagtacacctacactaatagtctgtctcaacaatgagtaaaggaacttaagtattggtttaatattaaccttgtatctcattttgaaggaatttaatattttaagcaaggatgttcaaaatcttacatataataagtaaaaagtaagactgaatgtctacgttcgaaacaaagtaatatgaaaatatttaaacagcattacaaaatcctagtttatactagactaccatttaaaaatcatgtttttatataaatgcccaaatttgagatgcattattcctattactaatgatgtaagtacgaggataaatccaagaaactttcaactctttgcctttcctggcctttactggatcccaaaagcatttaaggtacatgttccaaaaactttgaaaagctaaatgtttcccatgatcgctcattcttcttttatgattcatacgttattccttataaagtaagaactttgttttcctcctatcaaggcagctattttattaaatttttcacttagtctgagaaatagcagatagtctcatatttaggaaaactttccaaataaaataaatgttattctctgataaagaaaaaaaaaaaaaaaaaaa

SEQ ID NO: 2511 - DNA, 2815 bp, Homo sapiens
ctgctgggccctgaaattttactcagcagtttggcacgagacatagcttttctcattcaccctcccacttggggctaatgcacagacatgaacatctattgaggaaaaccacaaaaaacttcaaaacagctacaacgggaaaaagagagttttgtcccacagtcagcaggccactagtttattaacttccagtcaccttgatttttgctaaaatgaagactctgcagtctacacttctcctgttactgcttgtgcctctgataaagccagcaccaccaacccagcaggactcacgcattatctatgattatggaacagataattttgaagaatccatatttagccaagattatgaggataaatacctggatggaaaaaatattaaggaaaaagaaactgtgataatacccaatgagaaaagtcttcaattacaaaaagatgaggcaataacaccattacctcccaagaaagaaaatgatgaaatgcccacgtgtctgctgtgtgtttgtttaagtggctctgtatactgtgaagaagttgacattgatgctgtaccacccttaccaaaggaatcagcctatctttacgcacgattcaacaaaattaaaaagctgactgccaaagattttgcagacatacctaacttaagaagactcgattttacaggaaatttgatagaagatatagaagatggtactttttcaaaactttctctgttagaagaactttcacttgctgaaaatcaactactaaaacttccagttcttcctcccaagctcactttatttaatgcaaaatacaacaaaatcaagagtaggggaatcaaagcaaatgcattcaaaaaactgaataacctcaccttcctctacttggaccataatgccctggaatccgtgcctcttaatttaccagaaagtctacgtgtaattcatcttcagttcaacaacatagcttcaattacagatgacacattctgcaaggctaatgacaccagttacatccgggaccgcattgaagagatacgcctggagggcaatccaatcgtcctgggaaagcatccaaacagttttatttgcttaaaaagattaccgatagggtcatacttttaacctctattggtacaacatataaatgaaagtacacctacactaatagtctgtctcaacaatgtgtaaaggaacttaagtattggtttaatattaaccttgtatctcattttgaaggaatttaatattttaagcaaggatgttcaaaatcttacatataataagtaaaaagtaagactgaatgtctacgttcgaaacaaagtaatatgaaaatatttaaacagcattacaaaatcctagtttatactagactaccatttaaaaatcatgtttttatataaatgcccaaatttgagatgcattattcctattactaatgatgtaagtacgaggataaatccaagaaactttcaactctttgcctttcctggcctttactggatcccaaaagcatttaaggtacatgttccaaaaactttgaaaagctaaatgtttcccatgatcgctcattcttcttttatgattcatacgttattccttataaagtaagaactttgttttcctcctatcaaggcagctattttattaaatttttcacttagtctgagaaatagcagatagtctcatatttaggaaaactttccaaataaaataaatgttattctctgataaagagctaatacagaaatgttcaagttattttactttctggtaatgtcttcagtaaaatattttctttatctaaatattaacattctaagtctaccaaaaaaagttttaaactcaagcaggccaaaaccaatatgcttataagaaataatgaaaagttcatccatttctgataaagttctctatggcaaagtctttcaaatacgagataactgcaaaatattttccttttatactacagaaatgagaatctcatcaataaattagttcaagcataagatgaaaacagaatattctgtggtgccagtgcacactaccttcccacccatacacatccatgttcactgtaacaaactgaatattcacaataaagcttctgagtaacactttctgattactcatgataaactgacatggctaactgcaagaattaaatcttctatctgagagtaataatttatgatgactcagtggtgccagagtaaagtttctaaaataacattcctctcacttgtaccccactaaaagtattagtctacacattacattgaagttaaacacaaaattatcagtgttttagaaacatgagtccggactgtgtaagtaaaagtacaaacattatttccaccataaagtatgtattgaaatcaagttgtctctgtgtacagaatacatacttattcccatttttaagcatttgcttctgttttccctacctagaatgtcagatgtttttcagttatctccccatttgtcaaagttgacctcaagataacatttttcattaaagcatctgagatctaagaacacaattattattctaacaatgattattagctcattcacttattttgataactaatgatcacagctattatactactttctcgttattttgtgtgcatgcctcatttccctgacttaaacctcactgagagcgcaaaatgcagctttatactttttactttcaattgcctagcacaatagtgagtacatttgaattgaatatataataaatattgcaaaataaaatccaaaaaaaaaaaaaaaaaaaaaaaaaaaaaaaaaaaaaaaaaaaaaaaaaaaaaaaaaaaaaaaaa

SEQ ID NO: 2512 - DNA, 2735 bp, Homo sapiens; identical to SEQ ID NO: 1101

SEQ ID NO: 2513 - DNA, 2125 bp, Homo sapiens
ggctgctgcaggcgtccggcttggacgaaccgccgttcccagtgctgggaccctttaagtatgcaggtgatagactagagaacaagacctctgtctccgtagcatcctggagcagtctgaatgccagaatggataaccgttttgctacagcatttgtaattgcttgtgtgcttagcctcatttccaccatctacatggcagcctccattggcacagacttctggtatgaatatcgaagtccagttcaagaaaattccagtgatttgaataaaagcatctgggatgaattcattagtgatgaggcagatgaaaagacttataatgatgcactttttcgatacaatggcacagtgggattgtggagacggtgtatcaccatacccaaaaacatgcattggtatagcccaccagaaaggacagagtcatttgatgtggtcacaaaatgtgtgagtttcacactaactgagcagttcatggagaaatttgttgatcccggaaaccacaatagcgggattgatctccttaggacctatctttggcgttgccagttccttttaccttttgtgagtttaggtttgatgtgctttggggctttgatcggactttgtgcttgcatttgccgaagcttatatcccaccattgccacgggcattctccatctccttgcaggtctgtgtacactgggctcagtaagttgttatgttgctggaattgaactactccaccagaaactagagctccctgacaatgtatccggtgaatttggatggtccttctgcctggcttgtgtctctgctcccttacagttcatggcttctgctctcttcatctgggctgctcacaccaaccggaaagagtacaccttaatgaaggcatatcgtgtggcatgagcaagaaactgcctgctttacaattgccatttttatttttttaaaataatactgatattttccccacctctcaattgtttttaatttttatttgtggatataccattttattatgaaaatctattttatttatacacattcaccactaaatacacacttaataccactaaaatttatgtggtttactttaagcgatgccatctttcaaataaactaatctaggtctagacagaaagaaatggatagagacttgacacaaatttatgaaagaaaattgggagtaggaatgtgaccgaaaacaagttgtgctaatgtctgttagacttttcagtaaaactaaagtaactgtatctgttcaactaaaaactctatattagtttctttgggaaacctctcatcgtcaaaactttatgttcactttgctgttgtagatagccagtcaaccagcagtattagtgctgttttcaaagatttaagctctataaaattgggaaattatctaagatcattttccctaagcattgacacatagcttcatctgaggtgagatatggcagctgtttgtatctgcactgtgtctgtctacaaaaagtgaaaaatacagtgtttacttgaaattttaactttgtaactgcaagaattccagttcagccgggcgaggattagtattatttttaactctccgtaagattttcagtaccaccaaattgttttggattttttttctttcctcttcacataccagggttattaaaagtgtgctttctttttacattatattacagttacaaggtaaaattcctcaactgctatttatttattccagcccagtactataaagaacgtttcaccataatgaccctccagagctgggaaacctaccacaagatctaaagttctggctgtccattaacctccaactatggtctttatttcttgtggtaatatgatgtgcctttccttgcctaaatcccttcctggtgtgtatcaacattatttaatgtcttctaattcagtcatttttttataagtatgtctataaacattgaactttaaaaaacttatttatttattccactactgtagcaattgacagattaaaaaaatgtaacttcataatttcttaccataacctcaatgtcttttttaaaaaataaaattaaaaatgaaaagagaaaaaaaaaaaaaaaaaataaaaaaaaaaagcttgtccttggccgtgaccacgctaagcc

SEQ ID NO: 2514 - DNA, 1122 bp, Homo sapiens
  misc_feature (1103)..(1103): n equals a,t,g, or c
gttcagtgttgtctgttttagtatgcaggtgatagactagagaacaagacctctgtctccgtagcatcctgggtatgtgagcattcaataagtacttttatgagaatgagttttgttttaagcttaattaaaaacatgcttgctttctaaaaaaaattcttaatggttatatgtacgaagggatggggaattgggtaaagggtgcatttggaataattcaaaataatctttcttatttgtccgtaaactctaacttatcttctttcttcaacttctaaacagagcagtctgaatgccagaatggataaccgttttgctacagcatttgtaattgcttgtgtgcttagcctcatttccaccatctacatggcagcctccattggcacagacttctggtatgaatatcgaagtccagttcaagaaaattccagtgatttgaataaaagcatctgggatgaattcattagtgatgaggcagatgaaaagacttataatgatgcactttttcgatacaatggcacagtgggattgtggagacggtgtatcaccatacccaaaaacatgcattggtatagcccaccagaaaggacagagtcatttgatgtggtcacaaaatgtgtgagtttcacactaactgagcagttcatggagaaatttgttgatcccggaaaccacaatagcgggattgatctccttaggacctatctttggcgttgccagttccttttaccttttgtgagtttaggtttgatgtgctttggggctttgatcggactttgtgcttgcatttgccgaagcttatatcccaccattgccacgggcattctycatctycttgcagataccatgctgtgaagtccaggccacatggaggtgtcctgtgtagatgctccagctgaaatcccaagctaagctcccaactgacagccaacatcatttccagccatgtgtgggagccatcctggatgtccagccttaacaagccttcagatgacttcagccacagctattatcttactacatccttgtgagactctaataaagaaccaactagctgagcccaatcaacctatggaactggtagaaataaaatgaattggtgntttgtgccgctaaaaaaaa

SEQ ID NO: 2515 - DNA, 740 bp, Homo sapiens
  misc_feature (10)..(10): n equals a,t,g, or c
  misc_feature (26)..(26): n equals a,t,g, or c
aaaattaatnctaatccttcgccggnttgacctgaaattctgscagttccaaagttaaaattccargtaaccccggkattttccmcttttggtagccagcccccagtgcagatccaaccagctgccatatctcacttcagatgaagctatgtgycaatgcttagggaaaatgatcttagataatttcccaattttatagagcttaaatctttgaaaccagcactaatactgctggttgactggctatctacaacagcaaagtgaacataaagttttgacgatgagaggtttcccaaagaaactaatatagagtttttagttgaacagatacagttactttagttttactgaaaagtctaacagacattagcacaacttgttttcggtcacattcctactcccaattttctttcataaatttgtgtcaagtctctatccatttctttctgtctagacctagattagtttatttgaaagatggcatcgcttaaagtaaaccacataaattttagtggtattaagtgtgtatttagtggtgaatgtgtataaataaaatagattttcataataaaatggtatatccacaaataaaaattaaaaacaattgagaggtggggaaaatatcagtattattttaaaaaaataaaaatggcaattgtaaagcaggcagtttcttgctcatgccacacgatatgccttcattaaggtgtactctttccggttggtgtgagcagcccaga

SEQ ID NO: 2516 - DNA, 2011 bp, Homo sapiens
ggcacgagggaggatgggcgagcagtctgaatgccagaatggataaccgttttgctacagcatttgtaattgcttgtgtgcttagcctcatttccaccatctacatggcagcctccattggcacagacttctggtatgaatatcgaagtccagttcaagaaaattccagtgatttgaataaaagcatctgggatgaattcattagtgatgaggcagatgaaaagacttataatgatgcactttttcgatacaatggcacagtgggattgtggagacggtgtatcaccatacccaaaaacatgcattggtatagcccaccagaaaggacagagtcatttgatgtggtcacaaaatgtgtgagtttcacactaactgagcagttcatggagaaatttgttgatcccggaaaccacaatagcgggattgatctccttaggacctatctttggcgttgccagttccttttaccttttgtgagtttaggtttgatgtgctttggggctttgatcggactttgtgcttgcatttgccgaagcttatatcccaccattgccacgggcattctccatctccttgcaggtctgtgtacactgggctcagtaagttgttatgttgctggaattgaactactccaccagaaactagagctccctgacaatgtatccggtgaatttggatggtccttctgcctggcttgtgtctctgctcccttacagttcatggcttctgctctcttcatctgggctgctcacaccaaccggaaagagtacaccttaatgaaggcatatcgtgtggcatgagcaagaaactgcctgctttacaattgccatttttatttttttaaaataatactgatattttccccacctctcaattgtttttaatttttatttgtggatataccattttattatgaaaatctattttatttatacacattcaccactaaatacacacttaataccactaaaatttatgtggtttactttaagcgatgccatctttcaaataaactaatctaggtctagacagaaagaaatggatagagacttgacacaaatttatgaaagaaaattgggagtaggaatgtgaccgaaaacaagttgtgctaatgtctgttagacttttcagtaaaactaaagtaactgtatctgttcaactaaaaactctatattagtttctttgggaaacctctcatcgtcaaaactttatgttcactttgctgttgtagatagccagtcaaccagcagtattagtgctgttttcaaagatttaagctctataaaattgggaaattatctaagatcattttccctaagcattgacacatagcttcatctgaggtgagatatggcagctgtttgtatctgcactgtgtctgtctacaaaaagtgaaaaatacagtgtttacttgaaattttaactttgtaactgcaagaattccagttcagccgggcgaggattagtattatttttaactctccgtaagattttcagtaccaccaaattgttttggattttttttctttcctcttcacataccagggttattaaaagtgtgctttctttttacattatattacagttacaaggtaaaattcctcaactgctatttatttattccagcccagtactataaagaacgtttcaccataatgaccctccagagctgggaaacctaccacaagatctaaagttctggctgtccattaacctccaactatggtctttatttcttgtggtaatatgatgtgcctttccttgcctaaatcccttcctggtgtgtatcaacattatttaatgtcttctaattcagtcatttttttataagtatgtctataaacattgaactttaaaaaacttatttatttattccactactgtagcaattgacagattaaaaaaatgtaacttcataatttcttaccataacctcaatgtcttttttaaaaaataaaattaaaaatgaaaagagaaaaaaaaaaaaaaaaaaaaaaaaaaaaaaaaaaaa

SEQ ID NO: 2517 - DNA, 2102 bp, Homo sapiens
ggcacgaggctgctgcaggcgtccggcttggacgaaccgccgttcccagtgctgggaccctttaagtatgcaggtgatagactagagaacaagacctctgtctccgtagcatcctggagcagtctgaatgccagaatggataaccgttttgctacagcatttgtaattgcttgtgtgcttagcctcatttccaccatctacatggcagcctccattggcacagacttctggtatgaatatcgaagtccagttcaagaaaattccagtgatttgaataaaagcatctgggatgaattcattagtgatgaggcagatgaaaagacttataatgatgcactttttcgatacaatggcacagtgggattgtggagacggtgtatcaccatacccaaaaacatgcattggtatagcccaccagaaaggacagagtcatttgatgtggtcacaaaatgtgtgagtttcacactaactgagcagttcatggagaaatttgttgatcccggaaaccacaatagcgggattgatctccttaggacctatctttggcgttgccagttccttttaccttttgtgagtttaggtttgatgtgctttggggctttgatcggactttgtgcttgcatttgccgaagcttatatcccaccattgccacgggcattctccatctccttgcaggtctgtgtacactgggctcagtaagttgttatgttgctggaattgaactactccaccagaaactagagctccctgacaatgtatccggtgaatttggatggtccttctgcctggcttgtgtctctgctcccttacagttcatggcttctgctctcttcatctgggctgctcacaccaaccggaaagagtacaccttaatgaaggcatatcgtgtggcatgagcaagaaactgcctgctttacaattgccatttttatttttttaaaataatactgatattttccccacctctcaattgtttttaatttttatttgtggatataccattttattatgaaaatctattttatttaacacattcaccactaaatacacacttaataccactaaaatttatgtggtttactttaagcgatgccatctttcaaataaactaatctaggtctagacagaaagaaatggatagagacttgacacaaatttatgaaagaaaattgggagtaggaagtgaccgaaaacaagttgtgctaatgtctgttagactttcagtaaaactaaagtaactgtatctgttcaactaaaaactctatattattttctttgggaaacctctcatcgtcaaaactttatgttcactttgctgttgtagatagccagtcaaccagcagtattagtgctgttttcaaagatttaagctctataaaattgggaaattatctaagatcattttccctaagcattgacacatagcttcatctgaggtgagatatggcagctgtttgtatctgcactgtgtctgtctacaaaaagtgaaaaatacagtgtttacttgaaattttaactttgtaactgcaagaattccagttcagccgggcgaggattagtattatttttaactctccgtaagattttcagtaccaccaaattgttttggattttttttctttcctcttcacataccagggttattaaagtgtgctttctttttacattatattacagttacaaggtaaaattcctcaactgctatttatttattccagccagtactataaagaacgtttcaccataatgaccctccagagctgggaaacctaccacaagatctaagttctggctgtccattaacctccaactatggtctttatttcttgtggtaatatgatgtgcctttccttgcctaaatcccttcctggtgtgtatcaacattatttaatgtcttctaattcagtcatttttttataagtatgtctataaacattgaactttaaaaaacttatttatttattccactactgtagcaattgacagattaaaaaaatgtaacttcataatttcttaccataacctcaatgtcttttttaaaaaataaaattaaaaatgaaaagagaaaaaaaaaaaaaaaaaaaaaaaaaaaaaaaaaaaa

SEQ ID NO: 2518 - DNA, 2178 bp, Homo sapiens
agactgtagtctcttgggaccttggtcacttctggcctgccctgcaccgaccagtaactgtgcctgatgactggaggtatggggaattcaccggactttattgttctttgtaggaatcaaagatcaactcccactgaggacaaatggacctgtaattccgggtgtgacgagagaacgtgatttaccttcctgaattaaaaaacaggtcattaagcttgggccctgactcttctttgtgagaaggtacagagatggaaaccttacaatccgagactaaaacgagggtccttccctcatggctgacagcccaggtggctacaaagaatgtggcaccaatgaaggcccccaagaggatgagaatggcagcagtgccagtggcagcagcaaggtgcgacagctctggtcagaagactcctgcgaatctgactccctgcgacaaggactgtgtactgcatgaatgaggctgagatagttgatgttgctctgggaatcctgattgagagccgcaaacaggaaaaggcctgcgagcagccggccctggcgggggctgataacccagagcactcccctccctgctccgtgtcgcctcacacaagttctgggagcagcagtgaggaagaggacagtgggaaacaggcactggctccaggcctcagccttcccagaggccgggcacgcgcagctctgcctgtagcaggagccctgaggaggaggaggaagaggatgtgctgaaatacgtccgggagatctttttcagctagggcataaactgtgcactgaactgtctgccgagagcagctggaggacagctgagcttccactggtgctgctgggccgcccgcctgtgggaatggggctctctgtgctcctacctttgtgccttcttgggcctggcagattcacctcaggccagaagcccctggacactccgggccttggggctgccgttctgagtgtgcggaaggcaggactcaaaatgagatcccatttgactccctctgtatgtactgtgccctctcctggctcttgaggctctggagtcccaattgtctgtgttagtcagtgaccaggttccagggaaaatgatgtcatgtggtggtccaacttactggaaccaaagagacagtactttgcaaagaaaaggatcactgccaggtgcactggaattgctacagtttagtccgcatgatctctcctgaaggaggaagcctgtttcaaaaatagtttccatcatgagtctatcaatgagctcccacctctccagccagcctagaaagcaaacgagctgcccacagttctctgccctgtctgggaggttgaggccacagtgtatagactggtaagccagacaggcctcctcccgcaagctgctaccttgctttcacctgtaccttggtccccgggcagctagctataaagcaagagggacaggagcccagaagagacactgaggacaagagatcacaccagagtacatgtctctgcctctgttttcagtgtggctttggacaggaatatatgaataaatcactgccatacaggttttccaatacacaagtgctagaaaatacacacaattccccaatgcgtaagttgtgctaatgtctttccaagttctgggttgggaagtggagggtggcagcgtttgtttgtgcgcaaccgtccagtcctgttcacagcgaggatttggagtcctccagggtctcatcatgggagtgatttgtcagcggacgcctctgccctgtctggcttcaggtccagggaagctttgaagcagtcaaagccttgtctttgtaccccatgtgtcctgtctttgttgagtcactcagagatcactcctggacctctggggttggagttccagtgatggcttatggcggcccactcactatggtgggctgagtggaagctccttaaccatgtccccagagacactgaggtgctcgctcttttaatgtcctcgtttgttgccgtaagttctttgctaggtttcattttggcatttggcaaatcagcctggaagtctggccccatgacagcaatcactccctccccaccctcctgaagctagaggaagatttgctcagatccattaataaagcaggaattggtgttgacaatgagctgcatggtttagggagtctttgggagccttggaagtcctgaaggacagacaat

SEQ ID NO: 2519 - DNA, 1285 bp, Homo sapiens; identical to SEQ ID NO: 964

SEQ ID NO: 2520 - DNA, 1681 bp, Homo sapiens
ggatttcagaggtgaaacagcttggggtgaaaacctgttagaaatgtggtggtttcagcaaggcctcagtttccttccttcagcccttgtaatttggacatctgctgctttcatattttcatacattactgcagtaacactccaccatatagacccggctttaccttatatcagtgacactggtacagtagctccagaaaaatgcttatttggggcaatgctaaatattgcggcagttttatgcattgctaccatttatgttcgttataagcaagttcatgctctgagtcctgaagagaacgttatcatcaaattaaacaaggctggccttgtacttggaatactgagttgtttaggactttcyattgtggcaaacttccagaaaacaaccctttttgctgcacatgtaagtggagctgtgcttacctttggtatgggctcattatatatgtttgktcagaccatcctttcctaccaaatgcagcccaaaatccatggcaaacaagtcttctggatcagactgttggtggttatctggtgtggagtaagtgcacttagcatgctgacttgctcatcagttttgcacagtggcaattttgggactgatttagaacagaaactccattggaaccccgaggacaaaggttatgtgcttcacatgatcactactgcagcagaatggtctatgtcattttccttctttggttttttcctgacttacattcgtgattttcagaaaatttctttacgggtggaagccaatttacatggattaaccctctatgacactgcaccttgccctattaacaatgaacgaacacggctactttccagagatatttgatgaaaggataaaatatttctgtaatgattatgattctcagggattggggaaaggttcacagaagttgcttattcttctctgaaattttcaaccacttaatcaaggctgacagtaacactgatgaatgctgataatcaggaaacatgaaagaagccatttgatagattattctaaaggatatcatcaagaagactattaaaaacacctatgcctatacttttttatctcagaaaataaagtcaaaagactatgatatcatagttttttataccttatttaagagaaacaacctgacgtgcaccaatcagtctgcacatcccaacccttcacattttataaattattgtagatcatgttttgttaggagcacttttatgagagacattttccatgactaaataatcagcattagtcagtaaatcctttagaactgggttttgaaatgggagttttatcatattaaatcatttcttgtagtcttacattttttgttgttgttctggaatctacctgtaaaggaaagtagacctggattcatgtgggctcttccatggcttaagtgttgcccaagagattttgtaggtaacgatttttttttttctggccmcaatgccagatactaagctaattggtctatcatacacatgcttgcagtagtttcatgaagtttagtctctggcgtgaaattttaatcmccaatgaaggagagaggcacctgtaggtaaatttactttagtcatattttatataaaacaagggttagtattcatgtaacattgagaagtttgggaataacagcagatatgattaataaaagtcataaccataaaaaaaaaa

SEQ ID NO: 2521 - DNA, 322 bp, Homo sapiens
ggcacgagcttaaacacagccgagaagttgcttctttgtactttttctacttttcctacttttttgtagaaaaaaaagataatgcctctgcttctatttctctgggggtgggggtgggggccgggagccgtcgcagacccgtttcatgcagcgtctccctcggcaccgcgttcggaggacgcaccctcactcccctgctgccttcactcctttctgaccaagcaacgctaacttttgtacagatcgatttgataaaattaaacaaagtgctttttatggacgtgggctgcaaaaaaaaaaaaaaaaaaaaaaaaaaaaaaac

SEQ ID NO: 2522 - DNA, 384 bp, Homo sapiens
gaatttttaccaaacacgcttaagagtctctgagagcccgaacatgttcaaaaaaatcctcttcccgttagttgctctgtttatgcttgcaggatgcgcaaaaccgccaacaactattgaagtttccccgacgattacactgccacagcaggatccaagcctgatgggcgtcaccgtaagcattaatggtgccgatcagcgtaccgatcaggcgctggcaaaagtcacccgcgataatcaaatcgttaccctgaccgcctcccgcgatctgcgtttcctgctgcaagaagtgctggaaaaacagatgaccgcgcgtggttacatggttggtccsaatggcccggttaatctgcaaatcatcgttagccaactgtatgctgacgg

SEQ ID NO: 2523 - DNA, 1472 bp, Homo sapiens
ggttcacacgcagctagacacagctaacttgagtcttggagctcctagagggaagcttctggaaaggaaggctcttcaggacctcttaggagccagagaagaggacgttgtcacagataaagagccaggctcaccagctcctgacgcatgcatcatgaccatgagacacaactggacaccagacctcagccctttgtgggtcctgctcctgtgtgcccacgtcgtcactctcctggtcagagccacacctgtctcgcagaccaccacagctgccactgcctcagttagaagcacaaaggacccctgcccctcccagcccccagtgttcccagcagctaagcagtgtccagcattggaagtgacctggccagaggtggaagtgccactgaatggaacgctgagcttatcctgtgtggcctgcagccgcttccccaacttcagcatcctctactggctgggcaatggttccttcattgagcacctcccaggccgactgtgggaggggagcaccagccgggaacgtgggagcacaggtacgcagctgtgcaaggccttggtgctggagcagctgacccctgccctgcacagcaccaacttctcctgtgtgctcgtggaccctgaacaggttgtccagcgtcacgtcgtcctggcccagctctgggctgggctgagggcaaccttgccccccacccaagaagccctgccctccagccacagcagtccacagcagcagggttaagactcagcacagggccagcagcagcacaaccttgaccagagcttgggtcctacctgtctacctggagtgaacagtccctgactgcctgtaggctgcgtggatgcgcaacacaccccctccttctctgctttgggtcccttctctcaccaaattcaaactccattcccacctacctagaaaatcacagcctccttataatgcctcctcctcctgccattctctctccacctatccattagccttcctaacgtcctactcctcacactgctctactgctcagaaaccaccaagactgttgatgccttagccttgcactccagggccctacctgcatttcccacatgactttctggaagcctcccaactattcttgcttttcccagacagctcccactcccatgtctctgctcatttagtcccgtcttcctcaccgccccagcaggggaacgctcaagcctggttgaaatgctgcctcttcagtgaagtcatcctctttcagctctggccgcattctgcagacttcctatcttcgtgctgtatgtttttttttttcccccttcactctaatggactgttccagggaagggatgggggcagcagctgcttcggatccacactgtatctgtgtcatccccacatgggtcctcataaaggattattcaatggaaaaaaaaaaaaaaaaaaaaaaaaaaaaactcgagggggggcccggtacccaattcgccctgggtta

SEQ ID NO: 2524 - DNA, 1468 bp, Homo sapiens
aattcggcacgagttcacacgcagctagacacagctaacttgagtcttggagctcctagagggaagcttctggaaaggaaggctcttcaggacctcttaggagccagagaagaggacgttgtcacagataaagagccaggctcaccagctcctgacgcatgcatcatgaccatgagacacaactggacaccagacctcagccctttgtgggtcctgctcctgtgtgcccacgtcgtcactctcctggtcagagccacacctgtctcgcagaccaccacagctgccactgcctcagttagaagcacaaaggacccctgcccctcccagcccccagtgttcccagcagctaagcagtgtccagcattggaagtgacctggccagaggtggaagtgccactgaatggaacgctgagcttatcctgtgtggcctgcagccgcttccccaacttcagcatcctctactggctgggcaatggttccttcattgagcacctcccaggccgactgtgggaggggagcaccagccgggaacgtgggagcacaggtacgcagctgtgcaaggccttggtgctggagcagctgacccctgccctgcacagcaccaacttctcctgtgtgctcgtggaccctgaacaggttgtccagcgtcacgtcgtcctggcccagctctgggctgggctgagggcaaccttgccccccacccaagaagccctgccctccagccacagcagtccacagcagcagggttaagactcagcacagggccagcagcagcacaaccttgaccagagcttgggtcctacctgtctacctggagtgaacagtccctgactgcctgtaggctgcgtggatgcgcaacacaccccctccttctctgctttgggtcccttctctcaccaaattcaaactccattcccacctacctagaaaatcacagcctccttataatgcctcctcctcctgccattctctctccacctatccattagccttcctaacgtcctactcctcacactgctctactgctcagaaaccaccaagactgttgatgccttagccttgcactccagggccctacctgcatttcccacatgactttctggaagcctcccaactattcttgcttttcccagacagctcccactcccatgtctctgctcatttagtcccgtcttcctcaccgccccagcaggggaacgctcaagcctggttgaaatgctgcctcttcagtgaagtcatcctctttcagctctggccgcattctgcagacttcctatcttcgtgctgtatgtttttttttttcccccttcactctaatggactgttccagggaagggatgggggcagcagctgcttcggatccacactgtatctgtgtcatccccacatgggtcctcataaaggattattcaatggaaaaaaaaaaaaaaaaaaaaaaaaaaaaaaaaaaaaaaaaaaaaaaaaaaaa

SEQ ID NO: 2525 - DNA, 1529 bp, Homo sapiens
  misc_feature (1519)..(1519): n equals a,t,g, or c
ggcacgaggtgactggagaagaggacgttgtcacagataaagagccaggctcaccagctcctgacgcatgcatcatgaccatgagacacaactggacaccagacctcagccctttgtgggtcctgctcctgtgtgcccacgtcgtcactctcctggtcagagccacacctgtctcgcagaccaccacagggccagcagcagcacaaccttgaccagagcttgggtcctacctgtctacctggagtgaacagtccctgactgcctgtaggctgcgtggatgcgcaacacaccccctccttctctgctttgggtcccttctcttaccaaattcaaactccattcccacctacctagaaaatcacagcctccttataatgcctcctcctcctgccattctctctccattggaagtgacctggccagaggtggaagtgccactgaatggaacgctgagcttatcctgtgtggcctgcagccgcttccccaacttcagcatcctctactggctgggcaatggttccttcattgagcacctcccaggccgactgtgggaggggagcaccagccgggaacgtgggagcacaggtacgcagctgtgcaaggccttggtgctggagcagctgacccctgccctgcacagcaccaacttctcctgtgtgctcgtggaccctgaacaggttgtccagcgtcacgtcgtcctggcccagctctgggctgggctgagggcaaccttgccccccacccaagaagccctgccctccagccacagcagtccacagcagcagggttaagactcagcacagggccagcagcagcacaaccttgaccagagcttgggtcctacctgtctacctggagtgaacagtccctgactgcctgtaggctgcgtggatgcgcaacacaccccctccttctctgctttgggtcccttctctcaccaaattcaaactccattcccacctacctagaaaatcacagcctccttataatgcctcctcctcctgccattctctctccacctatccattagccttcctaacgtcctactcctcacactgctctactgctcagaaaccaccaagactgttgatgccttagccttgcactccagggccctacctgcatttcccacatgactttctggaagcctcccactattcttgcttttcccagacagctcccactcccatgtctctgctcatttagtcccgtcttcctcaccgccccagcaggggaacgctcaagcctggttgaaatgctgcctcttcagtgaagtcatcctctttcagctctggccgcattctgcagacttcctatcttcgtgctgtatgttttttttttcccccttcactctaatggactgttccagggaagggatgggggcagcagctgcttcggatccacactgtatctgtgtcatccccacatgggtcctcataaaggattattcaatggaaaaaaaaaaaaaaaaaaaaaaaaaaaaaaaaaaaaaaaaaaaaaaaaaaaaaaaaaaaaaaanaaaaaaaaaa

SEQ ID NO: 2526 - DNA, 662 bp, Homo sapiens
gaattcggcacgaggttcccatggcactttatatgtgtgcatagagagccagggagcagtggggttcagggtgggcccatgctatgtgctgcagagctggtgggtcacagtctccccaggtgatggtggtgttaataatcatcctaggcccgtggggtggggtgaggattgatgcatgagaaagttgaggcgggggccctggcatggagcagggctcaggccgcttgtcacccaggctcatgtcagccctccggagcctgtgggtgtataggggaagcgcaggggttcttcagccagagggacaggttcarggcctgctgatgccccttgctggttttgggaccttgagcaagtccccttgccttttggtgctgtgcctcggtttcttcttctataagaaggaggtgatgatgtaacccacccacccagcccctctaccccgcgcatcagggtagcaggcgagctagcactgtggcaccaggagtggagctggcccctggcgggcccacgctggagaggcatcgccatctctgctgcccccctgtggcgtcatcatatcaacctgccagtccccctcacctggtgttaatctcccagaggatggggactgrttctgcatattctttgctaaacaaagacgctagtttggctgtggctctcga

SEQ ID NO: 2527 - DNA, 727 bp, Homo sapiens
  misc_feature (3)..(3): n equals a,t,g, or c
  misc_feature (66)..(66): n equals a,t,g, or c
  misc_feature (88)..(88): n equals a,t,g, or c
ttntaggcagtgtgttgacctactccattgaatggtctgttctcatgccagttggacagggctccntgatgcctccacacactctgtntttggtcttcttgacagaatgttgttggtgttcagctttcagcttctaataaggggtggttgagttggagggagaagaaccacaaaattcagtaagtccmagatttttggttttaagcatmccaaataagcagccmcgcgatgttgagagccctggcgggttagggatctccatgacctaggatactgcaactgataaatctgctcctgatcattgctgcctcccaaagatgtgtcttatcagtgagcccatttcctgcactacagaaccagagccactggccaggagtcagctaatgtttagaaaggatgaaagtctggctgctgcatttcctgtcttgtagattgatgacctttagctgttttgttgatgtcattgtatatctgtttttttgggatgagtataacaagaaaggaaaatggttaatctagcaagaactcattacaccgtgaatgatggagggtaggctcctgttttattccgatttgatttgtttgcttcattggggaaaacaaatgatcatgtcaccctatagagaatttcgctttccctttgacgtacaaataaacagcctcgcacgtttcatttatttttgccgctgctggaatggttgattaaaaaaaaaaaaaaaaaactcga

SEQ ID NO: 2528 - DNA, 827 bp, Homo sapiens
  misc_feature (14)..(14): n equals a,t,g, or c
  misc_feature (85)..(85): n equals a,t,g, or c
  misc_feature (743)..(743): n equals a,t,g, or c
  misc_feature (802)..(802): n equals a,t,g, or c
  misc_feature (811)..(811): n equals a,t,g, or c
gttttaaatacggnctcactatagggaaagctggtacgcctgcaggktaccggtccggaattcccgggtcgacccacgcgtccgnggggcaaggatttcatgagcatcctcctctaaacgcgtgtcaagacaaaagatgcttcagctttggaaacttgttctcctgtgcggcgtgctcactgggacctcagagtctcttcttgacaatcttggcaatgacctaagcaatgtcgtggataagctggaacctgttcttcacgagggacttgagacagttgacaatactcttaaaggcatccttgagaaactgaaggtcgacctaggagtgcttcagaaatccagtgcttggcaactggccaagcagaaggcccaggaagctgagaaattgctgaacaatgtcatttctaagctgcttccaactaacacggacatttttgggttgaaaatcagcaactccctcatcctggatgtcaaagctgaaccgatcgatgatggcaaaggccttaacctgagcttccctgtcaccgcgaatgtcactgtggccgggcccatcattggccagattatcaacctgaaagcctccttggacctcctgaccgcagtcacaattgaaactgatccccagacacaccagcctgttgccgtcctgggagaatgcgccagtgacccaaccagcatctcactttccttgctggacaaswmagccmattcatcttataaactgggctctcagggaacttgangaccctaatttcagctctagtcctctacctaagaagaggctaatggtgaaagtgttcangctctggantcatgttgaacttggt

SEQ ID NO: 2529 - DNA, 746 bp, Homo sapiens
  misc_feature (740)..(740): n equals a,t,g, or c
tttacgtgacactatagaaggtacgcctgcaggtaccggtccggaattcgcggccgcgtcgaccataaacatttgcaccacttgtggcttttgaatatcttccacagagggaagtttaaaacccaaacttccaaaggtttaaactacctcaaaacactttcccatgagtgtgatccacattgttaggtgctgacctagacagagatgaactgaggtccttgttttgttttgttcataatacaaaggtgctaattaatagtatttcagatacttgaagaatgttgatggtgctagaagaatttgagaagaaatactcctgtattgagttgtatcgtgtggtgtattttttaaaaaatttgatttagcattcatattttccatcttattcccaattaaaagtatgcagattatttgcccaaagttgtcctcttcttcagattcagcatttgttctttgccagtctcattttcatcttcttccatggttccacagaagctttgtttcttgggcaagcagaaaaattaaattgtacctattttgtatatgtgagatgtttaaataaattgtgaaaaaaatgaaataaagcatgtttggttttttgktgkttargcaaacttttctcttttttttgagacagagtttcgctcttatcacccaggctggagggcaatggcacgatcttggctcaccgaacctgcgcctccaggttcaagcaattctcctggctcagcctccagganctagga

SEQ ID NO: 2530 - DNA, 441 bp, Homo sapiens
  misc_feature (393)..(393): n equals a,t,g, or c
  misc_feature (406)..(406): n equals a,t,g, or c
taatgatgttgaccttgttgttgagggcaccagcaggttcacttacactgttcttgtagatggctgctctaaaaagacaaatgaatggggaaagacaatcattgaatacaaaacaaataagccatcacgcctgcccttccttgatattgcacctttggacatcggtggtgctgaccaggaattctttgtggacattggcccagtctgtttcaaataaatgaactcaatctaaattaaaaaagaaagaaatttgaaaaaactttctctttgccatttcttcttcttcttttttaactgaaagctgwatccttccatttcttctgcrcatctacttgcttaaattgtgggcaaaagagaaaaakaaggattgatcagagcattgtgcctgtctcntatacacatctcnaccctgaagcttggatgcttccaaaggagatctag

SEQ ID NO: 2531 - DNA, 357 bp, Homo sapiens
  misc_feature (4)..(4): n equals a,t,g, or c
  misc_feature (349)..(350): n equals a,t,g, or c
  misc_feature (354)..(354): n equals a,t,g, or c
tagntgcaggcwtgcaagcttcagggttgagatgtgtataagagacagatccagtagtaaccactgctccactctgggtggctgagtctcaagtcacggcatgtgcgagctgggttctttctagagccttcaggagtaagaagggtctcaatctggttgttgagagacttcagagtagcatcaacttcatagtccttgggtctgagagaaggtgctgagcgaggctggtcagccctgtagaagtctccatcgtaaccaaagtcataaccaccaccgcttacacctggaggtccaggagggccagggggaccaggggggccagcagggccttggtgaccctgagggcctnnaatngca

SEQ ID NO: 2532 - DNA, 385 bp, Homo sapiens
  misc_feature (373)..(373): n equals a,t,g, or c
tagtggatcccccgggtgcaggaattcggcagagctggtcaccatggtgatyawggtgctsstggctccgtgggtyctgctggtcctaggggccctgctggtccttctggccctgctggaaaagatggtcgcactggacatcctggtacagttggacctgctggcattcgaggccctcagggtcaccaaggccctgctggcccccctggtccccctggccctcctggacctccaggtgtaagcggtggtggttatgactttggttacgatggagacttctacagggctgaccagcctcgctcagcaccttctctcagacccaaggactatgaagttgatgctactctgaagctgtctcttatacacatctcgnccctgaagcttg

SEQ ID NO: 2533 - DNA, 678 bp, Homo sapiens
  misc_feature (18)..(19): n equals a,t,g, or c
  misc_feature (23)..(24): n equals a,t,g, or c
cattaacccttcctgggnncccnnaaaatttggaattttttttcaacactcttaccccttgttatggaaatgtcaccctttgtargaaacccaaattaaaawttgaaaawtaaaamccataaacattkgcaccacttgtggcttttgaatayctyccacagagggaagtttaaacccaaacttccaaaggtttaaactacctcaaaacactttcccatgagtgtgatccacattgttaggtgctgacctagmcagagatgaactgaggtccttgttttgttttgttcataatacaaaggtgctaattaatagtatttcagatacttgaagaatgttgatggtgctagaagaatttgagaagaaatactcctgtattgagttgtatcgtgtggtgtattttttaaaaaatttgatttagcattcatattttccatcttattcccaattaaaagtatgcagattatttgcccaaagttgtcctcttcttcagattcagcatttgttctttgccagtctcattttcatcttcttccatggttccacagaagctttgtttcttgggcaagcagaaaaattaaattgtacctattttgtatatgtgagatgtttaaataaattgtgaaaaaaatgaaataaagcatgtttggttttccaaaaaaaaaaaaaaaaaaactcgag

SEQ ID NO: 2534 - DNA, 713 bp, Homo sapiens
  misc_feature (648)..(648): n equals a,t,g, or c
  misc_feature (671)..(671): n equals a,t,g, or c
gctggtcaccatggtgatcaaggtgctcctggctccgtgggtcctgctggtcctaggggccctgctggtccttctggccctgctggaaaagatggtcgcactggacatcctggtacagttggacctgctggcattcgaggccctcagggtcaccaaggccctgctggcccccctggtccccctggccctcctggacctccaggtgtaagcggtggtggttatgactttggttacgatggagacttctacagggctgaccagcctcgctcagcaccttctctcagacccaaggactatgaagttgatgctactctgaagtctctcaacaaccagattgagacccttcttactcctgaaggctctagaaagaacccagctcgcacatgccgtgacttgagactcagccacccagagtggagcagtggttactactggattgaccctaaccaaggatgcactatggatgctatcaaagtatactgtgatttctctactggcgaaacctgtatccgggcccaacctgaaaacatcccagccaagaactggtataggagctccaaggacaagaaacacgtctggctaggagaaactatcaatgctggcagccagtttgaatataatgtagaaggagtgacttccaaggaaatngstacccaacttgccttcatgcncctgctggccaactatgcctctcagaacatcacctaccactg

SEQ ID NO: 2535 - DNA, 1880 bp, Homo sapiens
cccccgggctgcaggaattcggcacgagctggtcaccatggtgatcaaggtgctcctggctccgtgggtcctgctggtcctaggggccctgctggtccttctggccctgctggaaaagatggtcgcactggacatcctggtacagttggacctgctggcattcgaggccctcagggtcaccaaggccctgctggcccccctggtccccctggccctcctggacctccaggtgtaagcggtggtggttatgactttggttacgatggagacttctacagggctgaccagcctcgctcagcaccttctctcagacccaaggactatgaagttgatgctactctgaagtctctcaacaaccagattgagacccttcttactcctgaaggctctagaaagaacccagctcgcacatgccgtgacttgagactcagccacccagagtggagcagtggttactactggattgaccctaaccaaggatgcactatggatgctatcaaagtatactgtgatttctctactggcgaaacctgtatccgggcccaacctgaaaacatcccagccaagaactggtataggagctccaaggacaagaaacacgtctggctaggagaaactatcaatgctggcagccagtttgaatataatgtagaaggagtgacttccaaggaaatggctacccaacttgccttcatgcgcctgctggccaactatgcctctcagaacatcacctaccactgcaagaacagcattgcatacatggatgaggagactggcaacctgaaaaaggctgtcattctacagggctctaatgatgttgaacttgttgctgagggcaacagcaggttcacttacactgttcttgtagatggctgctctaaaaagacaaatgaatggggaaagacaatcattgaatacaaaacaaataagccatcacgcctgcccttccttgatattgcacctttggacatcggtggtgctgaccaggaattctttgtggacattggcccagtctgtttcaaataaatgaactcaatctaaattaaaaaagaaagaaatttgaaaaaactttctctttgccatttcttcttcttcttttttaactgaaagctgaatccttccatttcttctgcacatctacttgcttaaattgtgggcaaaagagaaaaagaaggattgatcagagcattgtgcaatacagtttcattaactccttccctcgctcccccaaaaatttgaatttttttttcaacactcttacacctgttatggaaaatgtcaacctttgtaagaaaaccaaaataaaaattgaaaaataaaaaccataaacatttgcaccacttgtggcttttgaatatcttccacagagggaagtttaaaacccaaacttccaaaggtttaaactacctcaaaacactttcccatgagtgtgatccacattgttaggtgctgacctagacagagatgaactgaggtccttgttttgttttgttcataatacaaaggtgctaattaatagtatttcagatacttgaagaatgttgatggtgctagaagaatttgagaagaaatactcctgtattgagttgtatcgtgtggtgtattttttaaaaaatttgatttagcattcatattttccatcttattcccaattaaaagtatgcagattatttgcccaaagttgtcctcttcttcagattcagcatttgttctttgccagtctcattttcatcttcttccatggttccacagaagctttgtttcttgggcaagcagaaaaattaaattgtacctattttgtatatgtgagatgtttaaataaattgtgaaaaaaatgaaataaagcatgtttggttttccaaaaaaaaaaaaaaaaaaaa

SEQ ID NO: 2536 - DNA, 3593 bp, Homo sapiens
  misc_feature (55)..(55): n equals a,t,g, or c
atatgcaggtttaagccgttttttccataccataccttgtcaagatttgcaagangatgcaagagtcatatccatatacaacaatgggcacttactgaaggccgtcttaaagttacgttkttagtaatstagcaggttactcatttttggatcctatgacagagaggcaaatgttcattgcacacttgagttaagcagtagtgyttgggaagaaaaacagaggagytctattaagacggytgaattaataaaaggaaatttacaaagtgttggacttacacttcgtcttgtccagtcaactgatgggtatgctgggcacgtcatcattgaaactgtggctccaaactcgcctgctgcaattgcagatcttcagcggggagatcgacttatcgccattggaggtgtgaaaatcacatcaacactgcaagtgttgaagcttatcaagcaggctggtgaccgagtcctggtgtactatgaaaggcctgttggcagagtaatcaaggtgcagtgctgcaagataactttggccagttggaagaaaactttttgtcaagctcatgccaatcgggttatgaagaggaagctgccgggttgacagtagatactgaaagtagagagctggattctgaatttgaagacttggcaagtgatgtcagagcacaaaatgagttcaaagatgaggcacaatcattaagtcatagtcccaaacgtgttccaacaacactttctattaaaccccttggagctatatcaccagttttaaaccgtaaattagctgtaggaagtcacccactaccaccgaaaattcagtccaaagatggaaataaacctccacccctaaaaacttctgagataacagacccagcacaagtgtcaaaaccaacccaaggatctgctttcaaaccacctgtgccaccacgaccacaagcgaaagttcctttgccttccgccgatgctccaaatcaggcagaaccagatgttctcgttgaaaagccagagaaggtggtgccacctcctcttgtagataaatctgctgaaaagcaagcaaaaaatgtggatgccatagacgatgcagctgcacctaagcaatttttagcaaagcaagaagtggccaaagatgtcacttcagaaacttcctgccctactaaggacagttcggacgaccgtcaaacatgggaatcatcagaaattctttatcgtaataagctaggaaaatggacaagaaccagagcatcctgtttgtttgacatagaagcctgtcacaggtacttaaacattgcattgtggtgcagggatcctttcaagttgggaggtctcatctgtttggggcatgttagtttaaaacttgaagatgtggctttaggatgcctagctacatcaaacacggaatacctttccaaattgagactggaagccccctcacctaaggctatagtcactagaaccgcactacgcaatctgagtatgcaaaagggattcaatgacaaattttgctatggtgacattactattcacttcaaatatttgaaagaaggagaatcagaccaccatgtagttactaacgtagaaaaagaaaaagaaccccatttggttgaagaagtttctgttctccctaaagaggagcaatttgttggacagatgggtttaacagaaaacaaacacagttttcaggatactcagttccagaacccaacatggtgtgactactgtaagaaaaaagtttggactaaagcagcttcccagtgtatgttttgtgcttatgtttgccataaaaaatgtcaagaaaagtgtctagctgagacttctgtttgtggagcaactgataggcgaatagacaggacactgaaaaaccttaggctggaaggacaggaaaccctcttaggcctgcctcctcgtgttgatgctgaagctagcaagtcagtcaataaaacaacaggtttgacaaggcatattatcaatactagttctcgtttattaaatttgcgtcaagtctctaaaactcgcctttctgaaccaggaaccgatctcgtagaaccttcaccaaaacacacacccaacacgtcagacaacgaaggcagtgacacggaggtctgtggtccaaacagtccttctaaacggggaaacagcacaggaataaagttagtgagaaaagagggtggtctggatgacagtgttttcattgcagttaaagaaattggtcgtgatctgtacaggggcttgcctacagaggaaaggatccagaaactagagttcatgttggrtaagctacagaatgaaattgatcaggagttggaacacaataattcccttgttagagaagaaaaagagacaactgatacaaggaaaaaatcacttctttctgctgccttagctaaatcaggtgaaaggctacaagctctaacacttcttatgattcactacagagcaggcattgaagatatagaaactttagaaagtctgtctttagaccagcactccaaaaaaataagcaagtacacagatgatacagaagaagaccttgataatgaaataagccaactaatagactctcagccattcagcagcatatcagatgacttatttggcccatccgagtctgtgtagcagacaggtctatttaaactttcaaatgaacagggtaaagttgcatctaaagtaccacagatacaaccatgtttaaatcctcgtatgcactctggcctgcttctccagttacttgcttgtgtaagaacaaaaatgagaaaggttgttttccagtaaaaacatgaccagcttactaattggttgttttggattgcatttatagctatgcttttttgggtttatactgggaatttatttttactaaattatttaacttttctaattatgtaattatgtaagctagcttttcatgtttatgtatgtatggtgtccccttgtgttatttttcttcctcttggtttttgaattagtgttaaatagaatactgtctrgattcttaaaatattttcatttccatcatggttataacaaatttgctgcatgcccaaactgacaacagcaatcactgagggaacaggttttgaatctttcttttgtgttatgaagtttatcgtctctacttgcttgagatttttgttattttgggggtttgggggtgctttttgttttgtttttgccaaatgtaacatgaaagcagatgctgcagctttagtctgttatgctgatttagtaaaaaaaaattttttacatatattgcttgctttcgatgcttctgtgaaatttttttctaaagcttttgtgcagctgtatggtaaaaatatggtgattaatttgaagagcttacattgaaagacaatgtaataggaaataaatgtagattgcagttggtcaagaattttgtagagaggataacaagacttaattactgaaaaacagtaacatagcattttgaaatataatcttttaaaatattgatgctttccttttaaatggaaatttaaattttatgattaaaagtttaaacatttatgataattttcctcatcagttctcccataggaaataaagcatgtgaaagggtaaaaaaaaaaaaaaaaaaaaaactcgag

SEQ ID NO: 2537 - DNA, 586 bp, Homo sapiens
ctacgagtttttttttttttttttttttttttttttttttttttttttttttttctgtggtagtctttattattattttttagctattgatacatagcatggcagcaagattacatcagtaatgtaatataatacagcttttttcattgaagctttgtaccttactatactctaggctatttggagtgttcccccacttgcactaaagtacaactatgatgtctctactgcctctcccagtgaaatataaaaatattgcactacattacagatatagtttacaaatgtcattagcagcattactgagctttctataattgtggtctacagagttaaatmcttttaaamcatgagtagmttcttataaaaccaaagttttgcattatttcaacagctctttcaaatgcatcagtttcagcaacatgcttgggtatcatgaaaacttccatggtttaatcaataaacaccagctacttacaagtagtccaccttccaggttatcaatggtaagttattttttataaagtggttacacactgagcagattgcctcaagtgtaagttatggaacaatactttagctttca

SEQ ID NO: 2538 - DNA, 1113 bp, Homo sapiens
  misc_feature (6)..(6): n equals a,t,g, or c
  misc_feature (10)..(11): n equals a,t,g, or c
  misc_feature (19)..(19): n equals a,t,g, or c
  misc_feature (635)..(635): n equals a,t,g, or c
gaaagncaanntaataggncaataaatgtagattgcagttggtcaagaattttgtagagaggataacaagacttaattactgaaaaacagtaacatagcatyttgaamyataatcttttaaaatattgatgctttccttttaaatggaaatttaaattttatgattaaaagtttaaacatttatgataattttcctcatcagttctcccataggaaataamgcatgtgaaagggtatttaaagttttggaggactctttttaaaatgactgtgttgataactagtttgggctggttttgttttagaaaaaacattttcatgtaggagtattctgtgaaggaaaggaatcatgcaaaatatactttttgctttggcgtcttacagttgtaaaggaatggtgatcattctgaatacttctgtagtgagtattcattaagaaaagaatgacaaaaatagtattcatacataggaattgggaccagttctctgaaaatgaagatatactcacactgggtccattttacgggtcccagtaacatttgactgagggaaaacaagtaagctcgactgttgttggggtaccttaatggtttcggkctgktatatacctataaaatagacaagtatatgtttgnccctttgtaggtaactgctatgatgattgctatatagtgaaactgacatgagtttaaaactagatggagcagcttttattgctggcaggaaaaagcatggtgtaatattaaggactggggcccaggtctagactycaggactccataaaagagtttaagttcaagcccttccattaatgaactgtgtaagcataggcagttacaaaaggacccatctctaaaatgggaataataatactttacctccctcacagtattgttgtgagggaaacaatagcataactgcaaaagtgctttgaacagtaaaaagatatmcaagtaaaaggcmttatttatatgagtaagaaagmcwtttttrrgggragaaaagttatyccmctttaaaaatcaatagccaagtctcatgccttttgttactttagtaagcgaaaatttcaggtactaaatacctttcttagccaagtttatamcaaaaaca

SEQ ID NO: 2539 - DNA, 2517 bp, Homo sapiens; identical to SEQ ID NO: 1774
  misc_feature (2517)..(2517): n equals a,t,g, or c

SEQ ID NO: 2540 - DNA, 655 bp, Homo sapiens
  misc_feature (4)..(4): n equals a,t,g, or c
  misc_feature (313)..(313): n equals a,t,g, or c
  misc_feature (493)..(493): n equals a,t,g, or c
  misc_feature (520)..(520): n equals a,t,g, or c
  misc_feature (566)..(566): n equals a,t,g, or c
tctngaactagtggatcccccgggctgcaggaattcggcacgaggtmactgccctgcgccggcggcactgggtggccctgcgccaggtggacggtgtctactacaacctggactccaagctgcgggcgcccgaggccctgggggatgaggacggagtcagggccttcctggcggctgcgctggcccagggcctgtgcgaggtgctgctggtagtgaccaaggaggtggaggagaagggcagctggctgcggacagactgaccatggctgaccatcggcgcccacagcgcagtccctgcrcatccccctccggntgcgcacactgcatgcctgggaaaggccagcacttcatggaccctggggaggccccaccccctccccacacccctgctccccactgccgctgctgcctcaataaatctgctgatttgcaaaaaaaaaaaaaaaaaactcgagggggggcccggtacccaattcgccctatagtgagtcgnattacaattcactggccgtcgttttanaacgtcgtgactgggaaaaccctggcgttacccaactttaatcgcnttgcagcacatccccctttcgccagctggcgtaatagcgaagaggcccgcaccgatcgccctttcccaacagttgcgcacctggaatgg

SEQ ID NO: 2541 - DNA, 2044 bp, Homo sapiens; identical to SEQ ID NO: 1843
  misc_feature (2023)..(2025): n equals a,t,g, or c

SEQ ID NO: 2542 - DNA, 1266 bp, Homo sapiens
  misc_feature (19)..(19): n equals a,t,g, or c
  misc_feature (211)..(211): n equals a,t,g, or c
  misc_feature (213)..(213): n equals a,t,g, or c
gacactgggtccccttggngcctccccaggcttaatgattgtccagaaggcggctataaagggagcctgggaggctgggtggaggagggagcagaaaaaacccaactcagcagatctgggaactgtgagagcggcaagcaggaactgtggtcagaggctgtgcgtcttggctggtagggcctgctcttttctaccatggcagcccagggcnanggctattatcgcactgtgatcttctcagccatgtttgggggcttcagcctgtattacttcaatcgcaagaccttctcctttgtcatgccatcattggtggaagagatccctttggacaaggatgatttggggttcatcaccagcagccagtcggcagcttatgctatcagcaagtttgtcagtggggtgctgtctgaccagatgagtgctcgctggctcttctcttctgggctgctcctggttggcctggtcaacatattctttgcctggagctccacagtacctgtctttgctgccctctggttccttaatggcctggcccaggggctgggctggcccccatgtgggaaggtcctgcggaagtggtttgagccatctcagtttggcacttggtgggccatcctgtcaaccagcatgaacctggctggagggctgggccctatcctggcaaccatccttgcccagagctacagctgccttcttcctcctacgaaacatccgcaccaagatgggccgagtgtccaagaaggctgagtgaagagagtccaggttccggagcaccatcccacggtggccttccccctgcacgctctgcggggagaaaaggaggggcctgcctggctagccctgaacctttcactttccatttctgcgccttttctctcacccgggtggcgctggaagttatcagtggctagtgaggtcccagctccctgatcctatgctctatttaaaagataacctttggccttagactycgttagctcctatttcctgccttcagacaaacaggaaacttctgcagtcaggaaggctcctgtacccttcttcttttcctaggccctgtcctgcccgcatctaccccatccccacctgaagtgaggctatccctgcagctgcagggcactaatgacccttgacttctgctgggtcctaagtcctctcagcagtgggygactgctgttgccaatacctcagactccagggaaagagaggaggccatcattctcactgtaccactaggcgcagttggatataggtgggaagaaaagg

SEQ ID NO: 2543 - DNA, 3002 bp, Homo sapiens
cctctgattyttcttcttcagcagtttctaaccaggttagccactgattcacctggaacaaagccttgccttttcccggaaactcttgggttatatcttctttccaagccaagaaagcttcttcttcaataatttccatgtcatagaagtgcacaaaaaagcgaagtaacatgccttttgggaagttgctgttatagcagtgcacctggagagcatacagggcactgacttgtagatcaacgtgatcatgaagaaatttctgcattactggcttgaaagatagtagtagttgtttttcctgctctaactgttctttggaaggagcagaggatgaatctgtttcatcgctgggggggtttacttcactagaaatgtactgtaagaagctagtcattaagatgttcacaaatcctttatctacatgaagtttgggagagatgttatctttaatccatttatatatggtttgaggggatggatccaactttatttgcttcaacagttccttctccaatttgaggagtgggaataagaaactcagtccctttccttccaaaatctccaacatgcggtccttattctgatcaatttctgggagcattttctgcatattgaccttgctttgttgaaaaagttctgttaaccattctcgatcttgtaatttagctaactgctgaagacaaagtaggaagagaggaaaatgggtgccactttctagtggttgagctagttctgaaatgctcaccagctctgaaatgatggcacgagctgcaaactgtgctaaataggatttcaccaaagggatgtcaacctccagtttgggacactggtccaatacattcaggaaagcctgcatgaagttgtcacttgtggctatcccttcctgtttgagtaaactgatcaaagaacttgctttttctttatcttcatcgcttctatctagtgacaggatgattactttgcttaacatctcaggaagaaagtgtttaggagccctcatttctcttacaccattgacagcctcatttgcatttccactatttagatattcagtcacaacagtttcagttagtttaaggagttcttcctttgacggtggtggctttttgctggtcttggcaggcttttcctggataagtggtggattagttttgagaccaagctgaggtgtctgtcccagaggtggtgtttgagtgcgtggtggttgtgcactaggaggaatcatagttatctggggctgaagctttggcacttgatttttattcattaggaacgactgagcaggcctcaggctaatctcatctgcattaagctgtcctttcttagaaaaccgaggtggcatatccttcgactgtccttgcagctgggataagagtccctgactctggttatggtagagctggcttagcccctggcttttcataaacttgcctcccatctctccaaactgcgattgtgtgggaggcatgatgtgtcccccatggccattgaagagttgatttgaacgatgacgtcccatggtgggtgaaaatctatcctggataactcctggaccagtaccaattccgctacctggcatttgtccaaacatatcagcaagtcctccaagtgggtccctatccattttcatcctgggtggcatgaacggtccctccagaaagaagtcacttctcatcccttgagccataggagcaggaataaacacccctagatcttttactgcatcttgacgaatttgattgatcgtctttggtccattgtcaagaaaagccttgcgaggaacccaatggtgttctcgcaactctacggtatcctgcagcaggaaacgaatccttgctggcaattccttacttaacatcaaggagcacattcgggcaaagtactgatccattaaggacttggctcgttcatggtctaatctaggtcccactgtcctcattatctgacagaggcactccaaatcctctcccatatctttgagttggactctcttcttcttttccaaaagtgttttgatgcacttatgaaggatagattcgtgaataagatcaagcttgccaagctctccaatgaatttgatgtttcccaacatcttgatcttagcaatggctctctgttcctcctcctcggggaggaggggattttcacgcttatcatagacatcaacatttctagttcggttttcaaattcatcttgtaatttggaaattaggaggcgtctgaatgtggtgctttgcttctgtcctggttgaccctctgctgctgggccatcaaagtttggtgcatcttctgccaatcgcagacatagctgagcatacagtgagctatactttggctcttctagggctttgtccacaatcagcagtatgacccctttaaggatgagtttagactctacacccacattgaggagctcaaggcatagcttgtcaaacttttcaggagtaagcttatttagtatgcctcttactttcctgaagattgcatcatgtcgttctttttcgtttgcggagttgtttgctgcggagttgtcatctcgtctagtgcttcgtgcaggaatccatttctgagcgttttgccctggggttttccccaggaactcgctgttgccagcagtcttgggatagtgctgaggtgcacccctacttcctcctccgcccgaagaagcactgaaacgagaagcacccccttctgcaatcgcactctccactttggcggcttgacaacgaagaatcttcaaaagaataatattaatagatggggtggggaggggaggggacaggagaaatgaaataccttcaccgagaactcagcagctgccaccgcagctgcctcctcaggatccggtcgtcggggatagggaagggaggggaaaggggaacggaaaacaaaaaaaagggggagggaagggggaggaaggagtcggggacggcctcaaactcagctcagaggagtcgctgctgcagccgccactcggtacccgctgccacctccatagagcc

SEQ ID NO: 2544 - DNA, 1519 bp, Homo sapiens
  misc_feature (1)..(2): n equals a,t,g, or c
  misc_feature (1423)..(1423): n equals a,t,g, or c
  misc_feature (1480)..(1480): n equals a,t,g, or c
  misc_feature (1502)..(1502): n equals a,t,g, or c
  misc_feature (1506)..(1506): n equals a,t,g, or c
  misc_feature (1514)..(1514): n equals a,t,g, or c
nntatgatacgccagctcgaaattaaccctcactaaagggaacaaaagctggagctccaccgcggtggcggccgctctagaactagtggatcccccgggctgcaggaattcggcacgagggacaagctgctcccgacagaaggatgtcgctgctgagcctgccctggctgggcctcagaccggtggcaatgtccccatggctactcctgctgctggttgtgggctcctggctactcgcccgcatcctggcttggacctatgccttctataacaactgccgccggctccagtgtttcccacagcccccaaaacggaactggttttggggtcacctgggcctgatcactcctacagaggagggcttgaaggactcgacccagatgtcggccacctattcccagggctttacggtatggctgggtcccatcatccccttcatcgttttatgccaccctgacaccatccggtctatcaccaatgcctcagctgccattgcacccaaggataatctcttcatcaggttcctgaagccctggctgggagaagggatactgctgagtggcggtgacaagtggagccgccaccgtcggatgctgacgcccgccttccatttcaacatcctgaagtcctatataacgatcttcaacaagagtgcaaacatcatgcttgkgagtcccttgaagtctgggtcccagatggagtcttggggtggagggaccatggacacatctggtctggaattttggctcttctgrgtggcactgggccttgctcttcctctctgagccttggtttcctcatctgtaaaatggggatgataatccctacttgaaaggtcatttacttggcacacagtaggttctcagaaggtgtcagtttctgygtttttctcacagaatccctgtaaactcaagagagtaaaaatgaagattgtgtagtagtcattgctgattacaaaccacttcagaactcattggcttagagccataagggtttacaatcgctaacgagtctgtgagacagctggccagttcttctggatgtggaagggatcactcttggcacaagagcagctgtgggttggggggcagctttgctgatcctggctcagttcattcacgtttggggcttcagtaccttcagactcatctgggatgggctcagctgtgacacctggactttcccccatgtgattctctgcctccagaaggcaccctgttgttcacatggcagagactgggctccgagaaactgagaggaggctgcaatgtctgtggacattggctctgcaatacttcaaaagtcaaccaggtttgagtctattagagttattacatcatcatttcaccacattgtactggccaaagaaagtcgaaagtcaaaaagtcccagtaccagacttcaaaagggggtgtaaaaatangaaacgccatctctttaaatggggaagtttgcttggaaaaaaattaacctggggggnaaaagggggtaccccaaaattncccngggggaangaaaa

SEQ ID NO: 2545 - DNA, 1669 bp, Homo sapiens
  misc_feature (508)..(508): n equals a,t,g, or c
ggccgatagagacgcctttgaccccatccccctatcaccaatgcctcagctgccattgcacccaaggataatctyttcatcaggttcctgaagccctggctgggtgagtacctgcaggtgaaaggggttggggacaaccttgcggggagggtaggggaagtgctgctcttgcccattgtccttggctgccctactaggagaagggatactgctgagtggcggtgacaagtggagccgccaccgtcggatgctgacgcccgccttccatttcaacatcctgaagtcctatataacgatcttcaacaagagtgcaaacatcatgcttgacaagtggcagcacctggcctcagagggcagcagtcgtctggacatgtttgagcacatcagcctcatgaccttggacagtctacagaaatgcatcttcagctttgacagccattgtcaggagaggcccagtgaatatattgccaccatcttggagctcagtgcccttgtagagaaaagaagncagcatatcctccagcacatggactttctgtattacctctcccatgacgggcggcgcttccacagggcctgccgcctggtgcatgacttcacaracgctgtcawccgggascggcgtcgcaccctcccyactyagggtattgaygattytttcaaagacaaagccaagtccaagactttggatttcattgatgtgcttttgctgagcaaggatgaagatgggaaggcattgtcagatgaggatataagagcagaggctgacaccttcatgtttggaggccatgacaccacggccagtggcctctcctgggtcctgtacaaccttgcgaggcacccagaataccaggagcgctgccgacaggaggtgcaagagcttctgaaggaccgcgatcctaaagagattgaatgggacgacctggcccagctgcccttcctgaccatgtgcgtgaaggagagcctgaggttacatcccccagctcccttcatctcccgatgctgcacccaggacattgttctcccagatggccgagtcatccccaaaggcattacctgcctcatcgatattataggggtccatcacaacccaactgtgtggccggatcctgaggtgctgccttccccattcaccaccaccacccccatcctctacttttgtgtgtgtgtgtgtgaattccaaggttcctagtggagggggcagggwtttgatgaggaaaatccaacatcacctcaccccammacacacacaagtgtctctccaaggctgctggacataggaaatcccactgkcaaaccttctttgtctcacctgcaggtctacgaccccttccgctttgacccagagaacagcaaggggaggtcacctctggcttttattcctttctccgcagggcccaggaactgcatcgggcaggcgttcgccatggcggagatgaaagtggtcctggcgttgatgctgctgcacttccggttcctgccagaccacactgagccccgcaggaagctggaattgatcatgcgcgccgagggcgggctttggctgcgggtggagcccctgaatgtargcttgcagtgactttctgacccatccacctgtttttttgcagattgtcatgaataaaacggtgctgtcaaaaaaaaaaaaaaaaaaaaaaaaaaactcgag

SEQ ID NO: 2546 - DNA, 2972 bp, Homo sapiens
ggacgtgaggagcgttccatttggccagtggtgggcggttgccacagctggtttagggccccgaccactggggccccttgtcaggaggagacagcctcccggcccggggaggacaagtcgctgccacctttggctgccgacgtgattccctgggacggtccgtttcctgccgtcagctgccggccgagttgggtctccgtggttcaggccggctcccccttcctggtctcccttctcccgctgggccggtttatcgggaggagattgtcttccagggctagcaattggacttttgatgatgtttgacccagcggcaggaatagcaggcaacgtgatttcaaagctgggctcagcctctgtttcttctctcgtgtaatcgcaaaacccattttggagcaggaattccaatcatgtctgtgatggtggtgagaaagaaggtgacacggaaatgggagaaactcccaggcaggaacaccttttgctgtgatggccgcgtcatgatggcccggcaaaagggcattttctacctgacccttttcctcatcctggggacatgtacactcttcttcgcctttgagtgccgctacctggctgttcagctgtctcctgccatccctgtatttgctgccatgctcttccttttctccatggctacactgttgaggaccagcttcagtgaccctggagtgattcctcgggcgctaccagatgaagcagctttcatagaaatggagatagaagctaccaatggtgcggtgccccagggccagcgaccaccgcctcgtatcaagaatttccagataaacaaccagattgtgaaactgaaatactgttacacatgcaagatcttccggcctccccgggcctcccattgcagcatctgtgacaactgtgtggagcgcttcgaccatcactgcccctgggtggggaattgtgttggaaagaggaactaccgctacttctacctcttcatcctttctctctccctcctcacaatctatgtcttcgccttcaacatcgtctatgtggccctcaaatctttgaaaattggcttcttggagacattgaaagaaactcctggaactgttctagaagtcctcatttgcttctttacactctggtccgtcgtgggactgactggatttcatactttcctcgtggctctcaaccagacaaccaatgaagacatcaaaggatcatggacagggaagaatcgcgtccagaatccctacagccatggcaatattgtgaagaactgctgtgaagtgctgtgtggccccttgccccccagtgtgctggatcgaaggggtattttgccactggaggaaagtggaagtcgacctcccagtactcaagagaccagtagcagcctcttgccacagagcccagcccccacagaacacctgaactcaaatgagatgccggaggacagcagcactcccgaagagatgccacctccagagcccccagagccaccacaggaggcagctgaagctgagaagtagcctatctatggaagagacttttgtttgtgtttaattagggctatgagagatttcaggtgagaagttaaacctgagacagagagcaagtaagctgtcccttttaactgtttttctttggtctttagtcacccagttgcacactggcattttcttgctgcaagcttttttaaatttctgaactcaaggcagtggcagaagatgtcagtcacctctgataactggaaaaatgggtctcttgggccctggcactggttctccatggcctcagccacagggtccccttggaccccctctcttccctccagatcccagccctcctgcttggggtcactggtctcattctggggctaaaagtttttgagactggctcaaatcctcccaagctgctgcacgtgctgagtccagaggcagtcacagagacctctggccaggggatcctaactgggttcttggggtcttcaggactgaagaggagggagagtggggtcagaagattctcctggccaccaagtgccagcattgcccacaaatccttttaggaatgggacaggtaccttccacttgttgtatttattagtgtagcttctcctttgtctcccatccactctgacacctaagccccactcttttcccattagatatatgtaagtagttgtagtagagataataattgacatttctcgtagactacccagaaacttttttaatacctgtgccattctcaataagaatttatgagatgccagcggcatagcccttcacactctctgtctcatctctcctcctttctcattagccccttttaatttgtttttccttttgactcctgctcccattaggagcaggaatggcagtaataaaagtctgcactttggtcatttcttttcctcagaggaagcctgagtgctcacttaaacactatcccctcagactccctgtgtgaggcctgcagaggccctgaatgcacaaatgggaaaccaaggcacagagaggctctcctctcctctcctctcccccgatgtaccctcaaaaaaaaaaaaaatgctaaccagttcttccattaagcctcggctgagtgagggaaagcccagcactgctgccctctcgggtaactcaccctaaggcctcggcccacctctggctatggtaaccacactgggggcttcctccaagccccgctcttccagcacttccaccggcagagtcccagagccacttcaccctgggggtgggctgtggcccccagtcagctctgctcaggacctgctctatttcagggaagaagatttatgtattatatgtggctatatttcctagagcacctgtgttttcctctttctaagccagggtcctgtctggatgacttatgcggtgggggagtgtaaaccggaacttttcatctatttgaaggcgattaaactgtgtctaatgcaaaaaaaaaaaaaaaaaaaaaaaaaaaaaaaaaaa

SEQ ID NO: 2547 - DNA, 1331 bp, Homo sapiens
  misc_feature (78)..(78): n equals a,t,g, or c
  misc_feature (229)..(229): n equals a,t,g, or c
  misc_feature (1263)..(1263): n equals a,t,g, or c
  misc_feature (1268)..(1268): n equals a,t,g, or c
  misc_feature (1283)..(1283): n equals a,t,g, or c
caaagtcattttaggtgacactatagaaggtacgcctgcagtaccgttccggaattcccgggtcgacccacgcgtccncatgtctgaaaccactgtgggtgtggtgtgcaggcagctgggctgtgcagacaaagggaaaatcaaccctgcatctttagacaaggccatgtccattcccatgtgggtggacaatgttcagtgtccaaaaggacctgacacgctgtggcantgcccatcatctccatgggagaagagactggccagcccctcggaggagacctggatcacatgtgacaacaagataagacttcaggaaggacccacttcctgttctggacgtgtggagatctggcatggaggttcctgggggacagtgtgtgatgactcttgggacttggacgatgctcaggtggtgtgtcaacaacttggctgtggtccagctttgaaagcattcaaagaagcagagtttggtcaggggactggaccgatatggctcaatgaagtgaagtgcaaagggaatgagtcttccttgtgggattgtcctgccagacgctggggccatagtgagtgtgggcacaaggaagacgctgcagtgaattgcacagatatttcagtgcagaaaaccccacaaaaagccacaacaggtcgctcatcccgtcagtcatcctttattgcagtcgggatccttggggttgttctgttggccattttcgtcgcattattcttcttgactaaaaagcgaagacagagacagcggcttgcagtttcctcaagaggagagaacttagtccaccaaattcaataccgggagatgaattcttgcctgaatgcagatgatctggacctaatgaattcctcagaaaattcccatgagtcagctgatttcagtgctgctgaactaatttctgtgtctaaatttcttcctatttctggaatggaaaaggaggccattctgagccacactgaaaaggaaaatgggaatttataacccagtgagttcagcctttaagataccttgatgaagacctggactattgaatggagcagaaattcacctctctcactgactattacagttgcatttttatggagttcttcttctcctaggattcctaagactgctgctgaatttataaaaattaagtttgtgaatgtgactacttagtggtgtatatgagactttcaagggaattaaataaataaataagaatgttaaaaaaaaaaaaaaaaaaaaaaaaaaaaaaaaaaaaaaaaaaaaaaatncctgnggccgcaggcttttnccctttggtggggggttaattttgggcttggccctggccctccgtttt

SEQ ID NO: 2548 - DNA, 826 bp, Homo sapiens
  misc_feature (5)..(5): n equals a,t,g, or c
tcganttttttttttttttttttgagaatccaatagatttttattataaatttaatgcagacaatgctccctctatctcatccttcctaagaaaataaaatgaaatgaaaataagttgcaggacattatttacaatagaaaatcacttacatgaaattttaaaatagggtatgtattgtaagtgtgtgtgtgtgtgtgtgtgtgtgtgtctatacatagatatgaaataatcgtaggataatatgcatggaagtagcaaacaccaaattcaggacagtgttgatctctaagggaaagaccaaggcagtgagatcaagggatggttacacagagagcttcaactccatcctatgttttactttctcagcaataacattagactgaagatggtaaaatgtttagttctattgatctggctagtaggtgtatggagtttactatattactcaccacatgttctgtacatttcaaatacattacaataaaaagaagtagttttcccagtcatacaaacaggcaattttccaaaagagacaacagtagctgttccagagatgtacaatagtgcaggtagagatgaggaagaacaaggatgatgggggagggaggtggaggtggttaagggaataagagtgctgggtatagaagacaggtttatctctgacactttgaaactagtaaaatatgtwaaaacccccccataagaattaaagaaagaattccactatataaggtgtaaaaggttagaaatgactcactgttaatccagaaatcaggtactttacagagtgtacattatcccaaaaaccatccatttagccggaaa

SEQ ID NO: 2549 - DNA, 2050 bp, Homo sapiens
  misc_feature (796)..(796): n equals a,t,g, or c
  misc_feature (837)..(837): n equals a,t,g, or c
  misc_feature (1832)..(1832): n equals a,t,g, or c
  misc_feature (1879)..(1879): n equals a,t,g, or c
  misc_feature (1887)..(1887): n equals a,t,g, or c
  misc_feature (1918)..(1919): n equals a,t,g, or c
  misc_feature (1949)..(1949): n equals a,t,g, or c
  misc_feature (1965)..(1965): n equals a,t,g, or c
  misc_feature (1986)..(1986): n equals a,t,g, or c
ctcgaaattaaccctcactmaagggaacaaaagctggagctccaccgcggtggcggccgctctagaactagtggatcccccgggctgyaggaattyggcacgaggtatctgttggtcttcctaatatgactcaaggattctgggaaaattccatgctaacggacccaggaaatgttcagaaagcagtctgccatcccacagcttgggacctggggaagggcgacttcaggatccttatgtgcacaaaggtgacaatggacgacttcctgacagctcatcatgagatggggcatatccagtatgatatggcatatgctgcacaaccttttctgctaagaaatggagctaatgaaggattccatgaagctgttggggaaatcatgtcactttctgcagccacacctaagcatttaaaatccattggtcttctgtcacccgattttcaagaagacaatgaaacagaaataaacttcctgctcaaacaagcactcacgattgttgggactctgccatttacttacatgttagagaagtggaggtggatggtctttaaaggggaaattcccaaagaccagtggatgaaaaagtggtgggagatgaagcgagagatagttggggtggtggaacctgtgccccatgatgaaacatactgtgaccccgcatctctgktccatgkttctaatgattactcattcattcgatattacacaaggaccctttaccaattccagtttcaagaagcactttgtcaagcagctaaacatgaaggccctctgcacaaatgtgacatctcaanctctacagaagctggacagaaactgttcaatatgctgaggnttggaaaatcagaaccctggaccctagcattggaaaatgttgtaggagcaaagaacatgaatgtaaggccactgctcaactactttgagcccttatttacctggctgaaagaccagaacaagaattcttttgtgggatggagtaccgactggagtccatatgcagaccaaagcatcaaagtgaggataagcctaaaatcagctcttggagataaagcatatgaatggaacgacaatgaaatgtacctgttccgatcatctgttgcatatgctatgaggcagtactttttaaaagtaaaaaatcagatgattctttttggggaggaggatgtgcgagtggctaatttgaaaccaagaatctcctttaatttctttgtcactgcacctaaaaatgtgtctgatatcattcctagaactgaagttgaaaaggccatcaggatgtcccggagccgtatcaatgatgctttccgtctgaatgacgacagcctagagtttctggggatacagccaacacttggacctcctaaccagccccctgtttccatatggctgattgtttttggagttgtgatgggagtgatagtggttggcattgtcatcctgatcttcactgggatcagagatcggaagaagggcctgtaaatggaattcctgcattgctctaaccatgtacaaccttggacttagcttttacctgtaactggcttctgagagacaaagaggagaaaccttcactcctagtacacctattacagctgcagaggtagaggagacagttgcagaactagttacaatgacgataagaaacaatactttgttattccatagcacctttaatgttcatgtgtattatctcagctagccttgaaccgcctaagtaaggtgatgaggacgggtttaagccccactgatattttaaaagcccagagaaaagtgttcgttcctctactaacctgttcttttagagcagggatctgcatactaggcctgcagccnaaatgagtaggtagcccactacctatttttgtatagccagagggctnagaatggnttttacattttaagtggttttacatttaagnncaaaagaaggataatatttcatgacaagtnaaaattatatgaactnaaaattgtatgaattttatgnatttatatttcagtattcataattaaagttttattgaactacaaaaaaaaaaaaaaaaaaaaaa

SEQ ID NO: 2550 - DNA, 2911 bp, Homo sapiens
  misc_feature (1705)..(1705): n equals a,t,g, or c
  misc_feature (2847)..(2847): n equals a,t,g, or c
gtggatgtgatcttggctccccggggacgatgtcagctcttcctggctccttctcagccttgttgctgtaactgctgctcagtccaccattgaggaacaggccaagacatttttgggacaagtttaaccacgaagccgaagacctgttctatcaaagttcacttgcttcttggaattataacaccaatattactgaagagaatgtccaaaacatgaataatgctggggacaaatggtctgcctttttaaaggaacagtccacacttgcccaaatgtatccactacaagaaattcagaatctcacagtcaagcttcagctgcaggctcttcagcaaaatgggtcttcagtgctctcagaagacaagagcaaacggttgaacacaattctaaatacaatgagcaccatctacagtactggaaaagtttgtaacccagataatccacaagaatgcttattacttgaaccaggtttgaatgaaataatggcaaacagtttagactacaatgagaggctctgggcttgggaaagctggagatctgaggtcggcaagcagctgaggccattatatgaagagtatgtggtcttgaaaaatgagatggcaagagcaaatcattatgaggactatggggattattggagaggagactatgaagtaaatggggtagatggctatgactacagccgcggccagttgattgaagatgtggaacatacctttgaagagattaaaccattatatgaacatcttcatgcctatgtgaggccaaagttgatgaatgcctatccttcctatatcagtccaattggatgcctccctgctcatttgcttggtgatatgtggggtagattttggacaaatctgtactctttgacagttccctttggacagaaaccaaacatagatgttactgatgcaatggtggaccaggcctgggatgcacagagaatattcaaggaggccgagaagttcttgtatctgttggtcttcctaatatgactcaaggattctgggaaaattccatgctaacggacccaggaaatgttcagaaagcagtctgccatcccacagcttgggacctggggaagggcgacttcaggatccttatgtgcacaaaggtgacaatggacgacttcctgacagctcatcatgagatggggcatatccagtatgatatggcatatgctgcacaaccttttctgctaagaaatggagctaatgaaggattccatgaagctgttggggaaatcatgtcactttctgcagccacacctaagcatttaaaatccattggtcttctgtcacccgattttcaagaagacaatgaaacagaaataaacttcctgctcaaacaagcactcacgattgttgggactctgccatttacttacatgttagagaagtggaggtggatggtctttaaaggggaaattcccaaagaccagtggatgaaaaagtggtgggagatgaagcgagagatagttggggtggtggaacctgtgccccatgatgaaacatactgtgaccccgcatctctgttccatgtttctaatgattactcattcattcgatattacacaaggaccctttaccaattccagtttcaagaagcactttgtcaagcagctaaacatgaaggccctctgcacaaatgtgacatctcaactctacagaagctggacagaaactgttcaatatgctgaggnttggaaaatcagaaccctggaccctagcattggaaaatgttgtaggagcaaagaacatgaatgtaaggccactgctcaactactttgagcccttatttacctggctgaaagaccagaacaagaattcttttgtgggatggagtaccgactggagtccatatgcagaccaaagcatcaaagtgaggataagcctaaaatcagctcttggagataaagcatatgaatggaacgacaatgaaatgtacctgttccgatcatctgttgcatatgctatgaggcagtactttttaaaagtaaaaaatcagatgattctttttggggaggaggatgtgcgagtggctaatttgaaaccaagaatctcctttaatttctttgtcactgcacctaaaaatgtgtctgatatcattcctagaactgaagttgaaaaggccatcaggatgtcccggagccgtatcaatgatgctttccgtctgaatgacgacagcctagagtttctggggatacagccaacacttggacctcctaaccagccccctgtttccatatggctgattgtttttggagttgtgatgggagtgatagtggttggcattgtcatcctgatcttcactgggatcagagatcggaagaagggcctgtaaatggaattcctgcattgctctaaccatgtacaaccttggacttagcttttacctgtaactggcttctgagagacaaagaggagaaaccttcactcctagtacacctattacagctgcagaggtagaggagacagttgcagaactagttacaatgacgataagaaacaatactttgttattccatagcacctttaatgttcatgtgtattatctcagctagccttgaaccgcctaagtaaggtgatgaggacgggtttaagccccactgatattttaaaagcccagagaaaagtgttcgttcctctactaacctgttcttttagagcagggatctgcatactaggcctgcagccaaatgagtaggtagcccactacctatttttgtatagccagagggctagaatggttttacattttaagtggttttacatttaagcaaaagaaggataatatttcatgacaagtaaaattatatgaactaaaattgtatgaattttatgnatttatatttcagtattcataattaaagttttattgaactacaaaaaaaaaaaaaaaaaaaaaa

SEQ ID NO: 2551 - DNA, 1299 bp, Homo sapiens
ggccactcacaagggagcaatagcaaaaagtgaaagaaagtgacaaactagttgcaacaagtaaaatcaccctacaagacaaacagaacatggtgaagagagtcagcatcatgtcttacgcgttgcaagctgagatgaatcactttcacagtaaccggatctatgattacaacagtgtcatccgcctgtacctggagcagcaagtgcaattttacgaaacgattgcagaaaagctgaggcaggccctcagccgctttccagtgatgtaggacagaacgggccttgaagagaatgccgcgtgctttctcctgacttggggcaatgcaattcaaaactttttttcccctattattcagaaaaaaaaggaaacaaaaccaaaaagaaagagttgcaaaaaactgcatttattttattagccaccctaaatgcgtcagttatttagggatggtcttttgttcatttccgcatccattatttaaaccagtggaaattgtctctatttttggaaagtacttaaaagttaccagaattttcaatggaaaatgaggggtttctccccactgatattttacatagagtcataatttatatgtcttataaattataagtcttatataatttataagtctcccacaatcttccagttcttacccagtgtcagataattaattactaattactttcttaaaaacatgaactatgccagaataaaaaatatctatgtttgtatatttttataactcctttcagtcctctggggctcctgtcattgagggaagtcgttacgcctttcactgccacagttacagctcaagtgcttacacttcaagagggaggacgctgggggcccctggggctgctagtgccatcgtggtgtgtggcaggtgggccatcccatgtccctccagggggaccccacagcctggcagatgagcagatacccctggccacccatgtcctcagcgacatttctgatgtgctgctcttatgtgaggaccagtgctttctctctttgcacttccttcctaatcttggttaaggcatgttttatgccatgaagaatacattagaagaattgagggactttgtagagaattttgtggctttggtccracgggtgagtggctgtgcggaggcctgtgttcgggagggcctgggrgaaggagggcacccagcaccccggcgtctctggccctttcttattctttggctcctcatccaccgtgatgagaagcgctgctgtggccacggcacactgcttggcttgggtggcaggttcatggccagttggtgtcatca

SEQ ID NO: 2552 - DNA, 1940 bp, Homo sapiens
ttttttttctgaataataggggaaaaaaagttttgaattgcattgccccaagtcaggagaaagcacgcggcattctcttcaaggcccgttctgtcctacatcactggaaagcggctgagggcctgcctcagcttttctgcaatcgtttcgtaaaattgcacttgctgctccaggtacaggcggatgacactgttgtaatcatagatccggttactgtgaaagtgattcatctcagcttgcaacgcgtaagacatgatgctgactctcttcaccatgttctgtttgtcttgtagggtgattttacttgttgcaactagtttgtcactttctttcactttttctattgctcccttgtgagtgccaatgatgtcagggaagcagccaagaaaacctttatactcgtgattacattccatcaggaaatggagatctttctttggctgttctgccacgagactggcaatttcttcataagtctttcctgcttctgttattgcatcattgagatctgtttcaccttgatagccactggaactgaacactgtggccaaactctgcaaggcctttcctatcttctgatattccttgggtaatgggcccgtgcagcgcttccagtgctcctgccccaccgtcagcagctccttcacgccgtcatccatggccttggtgaacttccccacagcctcgcacttctgctctatttctactaagtccaagtcaggtgcctctggttccatggtggaaaatatcatgactcccgccagctcatctctctcggccttcctctttccagttttccattccttctcatctcggaaatttaggaactgctggaaaacttcactttctgagattactggatggcgacacatcctggtcatccaggcctgaagtctctccatgcgcattttgataaattcctcttcaaagcggcctgtgacttgtttgtctggaagagaagggattggaatggctgacccaaacttaaccaggagacgctcatataaccagtcaaagtgcttatacctgtggtttacagatcgattagtgttagtaggtgttagctgatattcgatgtagctctttagaccatacattttggagccttttctgggatctgctaccacacaagtcaaaagtagaggtaggataaacccacattgggccataatctccaacaatgatgggaattttctctttgggttttgctagttgtttggccaacaaatactgttccgtgcccaggtttcgcaaatccaggaaatttgttaaggggaattttcatggatgaggaactagcacgactgtttcctcgctgagcgccgcctgcatcagctgactctgaatccttaaagtaggaagaggatttgggcccatcccagtcttcatcccagtcatcatcatcaccagttgctggtccttggtaggcctgggggtggccgaaggcagtgtcccagttgttgggagtgtttgtgtttctttgggctccagccccctctggctgggccccccagccttctgagctttcccagttcccagatttggaggcactccaggctgaccaggggtcattgccactgccaacctggtgattgttgctggcagccgacgaactggcctgagctgtgctggctgagagagaatcaaggaaggcttggtcagccactgaatttccacaagaaaattgatcttttccatcactgggtaaaatttcaacgtagtctgtgggaaccagccctcgttctcctttgatgtttcttccttccagccatcctccacctacatccggatttgtgattgtgatgatttctccttcattaaccgtcagttcattatttccaggttcagcagcaaaatcatacataacccgagccttggtggccatggcgggcgggtccccccggcccgggacggccggctcgtctcccgcgccgcggatg

SEQ ID NO: 2553 - DNA, 804 bp, Homo sapiens
  misc_feature (24)..(24): n equals a,t,g, or c
taaaattagtgatcccccgggttncaagaattcggcacgagattaatcactgccctggaggaggatggcacggcccagaagatgcagctgggctatcggctccagcagattgcagctgctgtggaaaacaaggtcacagatctataggaacccaggagccacggcctgctgttgcttcagcctggcctgggcagccctggaagctcggaggagaggccaccttcttaggtgcctgtagtgactgacaagcagagttagtggaaggtgactcccagtctcctggtggctctggcctcggccctgctggatccacctcctagacccggggcctcaaggctcatggggtagtacccagcctgctccccgagtccagcgaccctgtgacaccggtctgcagggagttggggactaagggcttccagagagtggctggaagagactccaggcccctggggagactgtactgttcctgaacactggccttggccacactgggattcggagaggaaggaggagagccccatgcttcctgtctgcctcctccaccatccctgacctcagttgagctgcctctggccttgttgctgctgccacatcctaggtctaagagttgaacgcctctcctaggccactacaaactgacccctcagcagggctggctgccacagggctgccctgcctcataggtagccatggtgagggctatctgctgcaggggggtcttggggagagtggtgactccattgacccagcttttcattaaaggataacacactgcaaaaaaaaaaaaaaaaaaaactcgag

SEQ ID NO: 2554 - DNA, 2044 bp, Homo sapiens; identical to SEQ ID NO: 1843
  misc_feature (2023)..(2025): n equals a,t,g, or c

SEQ ID NO: 2555 - DNA, 2491 bp, Homo sapiens
ggcacgagacagaaagaagttattcaacaggagaccagaagggttatgagaaaggaatagtcttcaagaagtgatttccatgggactcctgcttaaaccatttaaaatattggggtgcttaaaataggtttttaaaatactaagctttataggataaaagtatgtgcaagcttatgtactttttgttcctcttaagaatatattttgatcttttagcaggttcctttgtccacttctcttccattttgctttttattgctttctgtgctgtgcttactgtgcagctctgggactgtttagttctatgtctgatgtgtggaaaaatctattcttactgcctaatagtgtttaggaggtaataagacacaaggagccaggaaccgtatcagtttaatctatcttgagtggactgaatgtactttgtgggcacttattttgaacatgatggtgctgtggtaattggtatgattagtgtaatactttgctatattataaaatagttaaaaatggagttagatgttagataagatagcttgctcattattcattagaatcaattagttattactttgcattcactataaacacatttatttctctttcccaaaagtaaatgcttagcttattggtcaaatcagaagacagtcttttgaaatgattaattataccctattgttttaaaccagaactgttctcgtcattttaattcagctaatggttcctgacatggcttctgttgctctgaaaatggcaaaggaaaaagaagaggtgttttaagatatatcttatcaaaaaaggagacatgctggcatatgtattttgctgttgtttttatagtaaataccctttttgagttttgtgaccaaaatgtacatcaatttcattgctgatgcagtgttttgaattaacttctgtctttcgttactttttatagtggttttgtgaatgtttggatagaaactagggacaaatttgagtcaagatactctgtcaaattaagttataggattttagagttgaaagaagggatcataactcatgtatccaactttttcattttacgtttgtgaggaaactgactcagagaaacgaagacactcgtgaaactctacacatccaggtggggaccgggctaggtctcaaaacttgtctcttctaatccacactcatcttaacactaatgggctgaatatctgccttcattctgtctgtctcttatatatcttttctgcttttaaaaatcttggaattcttgttttctgacattactcacaacggaaattttaattcatgctagctgtgccaccgagcttgtgccgatcactgttttcctttttccttaaggatacaaatctgtgtgtgagtgtacgtgtgtataaaagaacctttcctttgcctctttgtacccagttcctccttttgcctacctccagaatgaaatagttgtctcccttttatttatttatttttaatgttttttggagacaaagtctcactgtattgcccagggtggtcttgacctcctggactcaagcgatcctacccccttggcctcccaaattgctgggattacactatgcccggccagctgtctcccttttaaacttaatggtttctttctgcattctctattttagcaacttccttgagatgttgctttgaagattaatttagctgttaattaatttagattttaacttaatactccttagttcaaataataatggccacatttaagagtatacttttcaagaagccaatatctggctacctgctgtttcatagtttcctcagttgaccattattaagttggaataattctcttatccaatattacagagctaactattcatgttgtccagaaatttgtgtgtagtccctttaaaattatctttgaaacatactttctcttactgaaataaaaatacatatctgtggaatgaagctgaaagcctagtctgtagtgacatgtggtacagcattgaacttgttggttggtagattgtttcttttcacttgtagagtactttctatttcagagttgattgaagttgttttgctagtccttccttggaatcatttcatccttgtgaaggacctctgtaatacagctgtagagcaggtattttggtgtggtgaactatacaacacagcctagaactttaataacataccattaagactatataaattaggtcaggcatagtggctcatgcctgtaatcccagtactttgggaggctgaggtgggaggatcccttagcccagaagtttgagatctgctgagcaacacagggagaccacatctctacaaaaattaaaaacgatttagctgaatgtggtgtacacttgtggtcccagctactcaggaggctgaggtgggaggagcacttaagcccaggaggtcgagactgcagtgagccgtgattgtgccactgcactcaagcctgggcgacagagtgagaccctgtctcaaaaaaaaaaaaaaaaaa

SEQ ID NO: 2556 - DNA, 1763 bp, Homo sapiens
  misc_feature (4)..(4): n equals a,t,g, or c
  misc_feature (11)..(11): n equals a,t,g, or c
  misc_feature (19)..(19): n equals a,t,g, or c
  misc_feature (1683)..(1683): n equals a,t,g, or c
  misc_feature (1716)..(1716): n equals a,t,g, or c
ccgntatggantaacccgnttcactatagggcgaattgggtaccgggccccccctcgagttttttttttttttttttgagacagggtctcactytgtcgcccakgcttgagtgcagtggcacaatcacggctcactgcagtctcgacctcctgggcttaagtgctcctyccacctcagcctcctgagtagctgggaccacaagtgtacaccacattcagctaaatcgtttttaatttttgtagagatgtggtctccctgtgttgctcagcagatctcaaacttctgggctaagggatcctcccacctcagcctcccaaagtactgggattacaggcatgagccactatgcctgacctaatttatatagtcttaatggtatgttattaaagttctaggctgtgttgtatagttcaccacaccaaaatacctgctctacagctgtattacagaggtccttcacaaggatgaaatgattccaaggaaggactagcaaarcaacttcaatcaactctgaaatagaaagtactctacaagtgaaaagaarcaatctaccaaccaacaagttcaatgctgtaccacatgtcactacagarctaggctttcagcttcattccacagatatgtatttttatttcagtaagagaaagtatgtttcaaagataattttaaagggactacacacaaatttctggacaacatgaatagttagctctgtaatattggataagagaattattccaacttaataatggtcaactgaggaaactatgaaacagcaggtagccagatattggcttcttgaaaagtatactcttaaatgtggccattattatttgaactaaggagtattaagttaaaatctaaattaattaacagctaaattaatcttcaaagcaacatctcaaggaagttgctaaaatagagaatgcagaaagaaaccattaagtttaaaagggagacagctggccgggcatagtgtaatcccagcaatttgggaggccaagggggtaggatcgcttgagtccaggaggtcaagaccaccctgggcaatacagtgagactttgtctccaaaaamcattaaaaataaataaataaaagggagacaactatttcattctggaggtaggcaaaaggaggaactgggtacaaagaggcaaaggaaaggttcttttatacacacgtacactcacacacagatttgtataccttaaggaaaaaggaaaacagtgatcggcmcaagctcggtggcacagctagcatgaattaaaatttccgttgtgagtaatgtcagaaamcaagaattccaagatttwtaaaaagcagaaaagatatataagagacagacagaatgaaggcagatattcagcccattagtgttaagatgagtgtggattagaagagacaagttttgagacctagcccggtccccacctggatgtgtagagtttcacgagtgtcttcgtttctctgagtcagtttcctcacaaacgtaaaatgaaaaagttggatacatgagttatgatcccttctttcaactctaaaatcctataacttaatttgacagagtatcttgactcaaatttgtccctagtttctatccaaacattcacaaaaccactataaaaagtaacgaaagacagaagttaattcaaaacactgcatcagcaatgaaattgatgtncattttggtcacaaaactcaaaaagggtatttnctataaaaaaaacaacaaaatacatatgacagcatgtctccttgttt

SEQ ID NO: 2557 - DNA, 3052 bp, Homo sapiens
aggcatgcaagcttcagggctgagatgtgtataagagacagtcactaaagggaacaaaagctggagctccaccgcggtggcggccgctctagaactagtggatcccccgggctgcaggaattcggcacgaggagaaatcacagggagatgtacagcaatggggccatttaagagttctgtgttcatcttgattcttcaccttctagaaggggccctgagtaattcactcattcagctgaacaacaatggctatgaaggcattgtcgttgcaatcgaccccaatgtgccagaagatgaaacactcattcaacaaataaaggacatggtgacccaggcatctctgtatctgtttgaagctacaggaaagcgattttatttcaaaaatgttgccattttgattcctgaaacatggaagacaaaggctgactatgtgagaccaaaacttgagacctacaaaaatgctgatgttctggttgctgagtctactcctccaggtaatgatgaaccctacactgagcagatgggcaactgtggagagaagggtgaaaggatccacctcactcctgatttcattgcaggaaaaaagttagctgaatatggaccacaaggtagggcatttgtccatgagtgggctcatctacgatggggagtatttgacgagtacaataatgatgagaaattctacttatccaatggaagaatacaagcagtaagatgttcagcaggtattactggtacaaatgtagtaaagaagtgtcagggaggcagctgttacaccaaaagatgcacattcaataaagtwacaggactctatgaaaaaggatgtgagtttgttctccaatcccgccagacggagaaggcttctataatgtttgcacaacatgttgattctatagttgaattctgtacagaacaaaaccacaacaaagaagctccaaacaagcaaaatcaaaaatgcaatctccgaagcacatgggaagtgatccgtgattctgaggactttaagaaaaccactcctatgacaacacagccaccaaatcccaccttctcattgctgcagattggacaaagaattgtgtgtttagtccttgacaaatctggaagcatggcgactggtaaccgcctcaatcgactgaatcaagcaggccagcttttcctgctgcagacagttgagctggggtcctgggttgggatggtgacatttgacagtgctgcccatgtacaaagtgaactcatacagataaacagtggcagtgacagggacacactcgccaaaagattacctgcagcagcttcaggagggacgtccatctgcagcgggcttcgatcggcatttactgtgattaggaagaaatatccaactgatggatctgaaattgtgctgctgacggatggggaagacaacactataagtgggtgctttaacgaggtcaaacaaagtggtgccatcatccacacagtcgctttggggccctctgcagctcaagaactagaggagctgtccaaaatgacaggaggtttacagacatatgcttcagatcaagttcagaacaatggcctcattgatgcttttggggccctttcatcaggaaatggagctgtctctcagcgctccatccagcttgagagtaagggattaaccctccagaacagccagtggatgaatggcacagtgatcgtggacagcaccgtgggaaaggacactttgtttcttatcacctggacaacgcagcctccccaaatccttctctgggatcccagtggacagaagcaaggtggctttgtagtggacaaaaacaccaaaatggcctacctccaaatcccaggcattgctaaggttggcacttggaaatacagtctgcaagcaagctcacaaaccttgaccctgactgtcacgtcccgtgcgtccaatgctaccctgcctccaattacagtgacttccaaaacgaacaaggacaccagcaaattccccagccctctggtagtttatgcaaatattcgccaaggagcctccccaattctcagggccagtgtcacagccctgattgaatcagtgaatggaaaaacagttaccttggaactactggataatggagcaggtgctgatgctactaaggatgacggtgtctactcaaggtatttcacaacttatgacacgaatggtagatacagtgtaaaagtgcgggctctgggaggagttaacgcagccagacggagagtgataccccagcagagtggagcactgtacatacctggctggattgagaatgatgaaatacaatggaatccaccaagacctgaaattaataaggatgatgttcaacacaagcaagtgtgtttcagcagaacatcctcgggaggctcatttgtggcttctgatgtcccaaatgctcccatacctgatctcttcccacctggccaaatcaccgacctgaaggcggaaattcacgggggcagtctcattaatctgacttggacagctcctggggatgattatgaccatggaacagctcacaagtatatcattcgaataagtacaagtattcttgatctcagagacaagttcaatgaatctcttcaagtgaatactactgctctcatcccaaaggaagccaactctgaggaagtctttttgtttaaaccagaaaacattacttttgaaaatggcacagatcttttcattgctattcaggctgttgataaggtcgatctgaaatcagaaatatccaacattgcacgagtatctttgtttattcctccacagactccgccagagacacctagtcctgatgaaacgtctgctccttgtcctaatattcatatcaacagcaccattcctggcattcacattttaaaaattatgtggaagtggataggagaactgcagctgtcaatagcctagggctgaatttttgtcagataaataaaataaatcattcatccttttttttgattataaaaaaaaaaaaaaaaaaaactcgagggggggcccggtacccaattmgscstatagtgagtctgtctcttatacacatctcaaccatcatcgatg

SEQ ID NO: 2558 - DNA, 6933 bp, Homo sapiens
  misc_feature (389)..(389): n equals a,t,g, or c
gcacgccccagatcggaagtgacggagacgtgctagcgcgtcgaaggtagctctatggttttcctcgcgttcttgagtcgggaaatggccgctgtgtggttgcaacggagataaattcccggaaccgcgattcggcgtgtcaggaattcgaatttagagtttaatttctcagagcattctctccaggaagaatttttacagtatctcaaagacttcacttgacttcttgatcctgcataaaaccaaggagaaaagaaatgggtcgctccaattctagatcacattcttcaaggtcaaagtctagatcacagtctagttctcgatcaagatcaagatctcattctagaaagaagcgatacagttctaggtctcgttycagaamakattcnaaggtctcaggaaaaacaaaccaaaaaagctgaaggggaaccccaagaagagagtccgttgaaaagtaaatcacaggaggaaccgaaagatacatttgaacatgacccatctgagtctatcgatgaatttaataagtcatcagccacatccggtgatatttggcctggcctttcagcttatgataatagtcctagatcaccccatagtccttcacctattgctacaccacctagtcagagttcatcttgctctgatgctcccatgctcagtacagttcactctgcaaaaaatactccttctcagcattcacattccattcagcatagtcctgaaaggtctgggtctggttctgttggaaatggatctagtcgatacagtccttctcagaatagtccaattcatcacatcccttcacgaagaagtcctgcaaagacaatcgcaccacagaatgctccaagagatgagtctaggggccgttcctcgttttatcctgatggtggagatcaggaaactgcaaagactgggaagttcttaaaaaggttcacagatgaagagtctagagtattcctgcttgataggggtaataccagggataaagaggcttcaaaagagaaaggatcagagaaagggagggcagagggagaatgggaagatcaggaagctctagattacttcagtgataaagagtctggaaaacaaaagtttaatgattcagaaggggatgacacagaggagacagaggattatagacagttcaggaagtcagtcctcgcagatcagggtaaaagttttgctactgcatctcaccggaatactgaggaggaaggactcaagtacaagtccaaagtttcactgaaaggcaatagagaaagtgatggatttagagaagaaaaaaattataaacttaaagagactggatatgtagtggaaaggcctagcactacaaaagataagcacaaagaagaagacaaaaattctgaaagaataacagtaaagaaagaaactcagtcacctgagcaggtaaagtctgaaaagctcaaagacctctttgattacagtccccctctacacaagaatctggatgcacgagaaaagtctaccttcagagaggaaagcccacttaggatcaaaatgatagcgagtgattctcaccgtcctgaagtcaaactcaaaatggcacctgttcctcttgatgattctaacagacctgcttccttgactaaagacaggctgcttgctagtacacttgtccattctgtcaagaaggagcaagaattccgatccatctttgaccacattaagttgccacaggccagcaaaagcacttcagagtcatttattcaacacattgtgtccttggttcatcatgttaaagagcaatacttcaagtcagctgcaatgaccctaaacgagcggttcacttcgtatcagaaagccactgaagaacatagtactcggcaaaagagccctgaaatacacaggagaattgacatctcaccaagtaccctgaggaagcatacccgtttagcaggggaagagagagtttttaaagaagaaaatcaaaagggagataaaaaattaaggtgtgactctgctgaccttcggcatgacattgatcgccgtagaaaagaaagaagtaaagaacggggagattccaagggctccagggaatccagtggatcaagaaagcaggaaaaaactccaaaagattacaaggaatacaaatcttacaaagatgacagtaaacataaaagagagcaagatcattctcgatcttcatcctcttcagcatcaccttcttctcccagttctcgagaagaaaaggagagtaagaaggaaagagaagaagaatttaaaactcaccatgaaatgaaagaatactcaggctttgcaggagttagccgaccacgaggaaccttttttcgaattagaggcagaggaagagccagaggagtttttgctgggacaaatactggtccaaacaactcaaatactacttttcaaaagagaccgaaggaagaggaatgggatccagaatataccccaaagagcaagaagtacttcttgcatgacgacagagatgatggtgtggattattgggccaaaagaggaagaggtcgtggtacttttcaacgtggcagagggcgctttaacttcaaaaaatcaggtagcagtcctaaatggactcatgacaaataccaaggggatgggattgttgaagatgaagaagagaccatggaaaataatgaagaaaagaaggacagacgcaaggaagaaaaggaataataaatatgaagtaagattacaacagagcagaacttgcacccaccattttttttacctgatttttgttttcaaataagaatgtaagcattttacttaaattttactgtttgcaagtagtctatagaaattttgttttaagtcttcaaatatcttgagaaatagtagactgtatgttgaaaattgtactgaaataaagtagaaaattgttacgtaccatatttgtaactatcaacttttaaaacttttaacgtttttgttacatgcattgtaattctgctttgtctataagatatggtcaagtacagctctgtgaaagttctgattctcttccttccctgtttgtcaatgttttattctgaagtaaacgttagctctacatataaatcctggaacagaaattgtttatagagactacactaattattttaactgtatacatctgtttaatttgaacacactacatcgtagggtgactgatttttgaagtataccacagacaaaaagttgttactatggtaaactaagctagtttaacacttgagcaaatgcttaagaaggaattaaaaaaaaaaagctttgccaatagctaaaaagtacaagctattaaaaatcagattgaaaagttttgagaaaatgttatttttactgaaagcaagcagtggcctataaagaacattcttaggagccttttctatttgcgttcaaaactgtgtgttctctttctattcctatttgatagtttgagtcatggtcttagatattagctatttgtgagaggaaactggtttgtaacaatactgcaaatagaaaccccatttctactgaacatcctagttttaaacagaagaaaaactgtaatcctggggttggtatgtaggaggtctatcctgcagaataagttgatacattagtacctgatttcatatcttacatatttatttgagctgaacattagtttgtagtgtaactattagtaaaaatagagaaacacagcatactgttcattaatagtattttaaaaaaattgtttttcaaatgtcaccaataaaagttttggcaggaagcttgttgcggcattgatctaacctttttcccccccatttcagttgcagtttttgtagaatggctttttctttttcctcttaagagttctattcttcaggtagataatttttcaaatgtgaattatcttttgtgtctatattgatagctcttaaaggagtgaaaatctaaaatagtaaatttcaatgttaagtgtctgctttatgggcatatataaaagtagacacatttcatttgttaatttagttgtgtgtgtgtgttaaaaggagctaatgcttattctgttaatgtaaacttttgaagatcttaagtgtattgctctttcatcttaaacactttcgaggatttgcagtgcgtctagcacctagattacagccaggaacattggttaagaactgttggaaacaaaactaaaagcaaactcaacatatgtgatgtttatggccctcagatccttagtattgtgtgattttcccccgttaacatgtctttctaaaattgtctattaaagcagaggaaatacctgccaaaggaagtatgtattgcattaatcagggcataactaatattctcctgttcagaataatacttatttacgtgtgaaagcaacatggatgtgattcccaacacagaattttcatgacccttttattgtatacaaataaataccataacagttacttggttagacatcaaatctgtgtgcatgactatgtgcttatccacttaagacaataggtaaaaggggatctgagaaattatgtaatagggagtgggaataaaactacttaattcctgtgggcaggttatattttaagttcaaatgcattgctttaacctttggttacttttattctgttaaacagaattgaagaaagagtattataccagagtgtagtaggctagggtgattgtaagaactctgtaatagaatgtcattgtggatgttacctttttcagatccaagcatataaaaagcctgtatattttttaaaaacacatcttaactccacgctttacgatattataaaagttgaatggttcctcttggtaaggatatttgcttacaagtgctaggaaataactcactgatacctgcgttaacatactttgttttgcctagagaggggcaataaaaatgaaccaaaggatatttccagaaaggattaagaaagctgtttaagaaggccatgactctttaggtgtgtatgtgtacctttcagcatcctaggaatttttatactaaaagcaaaatgttttttccagttagtcttcttcaaggaattactattgttccttttgtcacaggtaaaatcagtgttgggaattataatttgagaaaaatattacccagtaacattgaatgtagatggctaaacgattcttactcagtgtgatgtataatgatgcaacagggacccttgtaaattgtcatacgccaataaaatgtcacaagtaataaactgctgttgtttgtttacctgtgtctatttcacacatcttatttctgtggcctattttagaatatcagcgcatctgttaggaagattactggtgtggtaaggcttgataaatgctttataaactccctcaaacctttctttactgtttttttgttttgtcttgtttttgtttttgtttttgtttttgtttttgtttttcccttgtctcccctgggaaaatgggaaattttacagttggtaaatctaagccaaaattattttgaaataaaggaattctggatgtccagtttagtcctcgttttcttacgttaatctgggaccttatcacccataatatggtgattacttctctttctaaaaacatagtagctagtaaataagtaaaaagaattgtcttttcattcactttaagtaagatgtggtataattcttaccatgtgccatcctgtcagttttaacaaagcattttcacagaaatttgtgtactaagacaaactgacacattttgactcatacaaatggcaaattagtccttaaaaattctgtgagagaaataactctgtgtgtacatacatatgcatgtaaagtgttgtgtaagatcattggtagcttaattatactggataattgtaatgttatatacaaatttcttatataaaagtatgctgcattattaacatttgtttaacttttcttatttttctttttctgggtttcaactggaatcccattggtggggatgtaccttaagtttccttgtggaataatagactttcacatccagaaagagaagttcagaggcctttctcaatttacagagttgaagaggaaaggcaaatggaggaataaacttcattgtcattgggattaatttggctagactcaatctcttgagccttaaaatgagaaagtaatatccattacatgtttagagttctcaaatagttgatactattattaaatgtttcaaattttattggggtagatactaaaaattagtacactgtcctaatgaagtttaaatgaacaagttttacatttcttaggattcaggaatatatggaatctatttgtatttaattgacttgagagccacagagattgtgttgatttatgagctggactcctattgktttagaaacatgcagtaatgattaacttgtgtcaatgatggtaatgagaccaaacttgtacatttaattaagggtaccagttctttttatgttactagactataccttggcctttaaaaatgaatctcactgattaaagagaacaggcattattaggatagcattccaccacaactagaaacattcaaataatgtgtcttaattgtaatctgtatataggaaaatttttcctatggatatttttggtgttttaccacagtgaactgatttgtagcacttatgaagtgcagaaggtaatattcttgaaaatagaaaaaggttgggtgagcaggctttaatgcctttcccccaagaatatacatcgaatttttcttaatcttttggggttggccagcttccagatttcattaataatgagctctgcctttaataaaagtacatgatcatagctacactgtatgtttaggtggtgtgaaatgatttataatcacagcttgaactgtgtttgcttggtactgtcatagtgattacaaatttcatggaatgcgaagagcaacaataaataaaaaataccactcacccaaaaaaaaaaaaaaaaa

SEQ ID NO: 2559 - DNA, 2238 bp, Homo sapiens
ggcacgagccggcwckagcaggccggcttctctgtccaatgcccacccggagctgggaggaggagtctgcgtaatgtgcgtgtgaagagactgggggagctggccggggctcacggtgtttgacccgtcggtcgtgcgtgagaggaaagggaaggaggaggtcccgaatagcggtcgccgaaatgttccggtgtggaggcctggcggcgggtgctttgaagcagaagctggtgcccttggtgcggaccgtgtgcgtccgaagcccgaggcagaggaaccggctcccaggcaacttgttccagcgatggcatgttcctctagaactccagatgacaagacaaatggctagctctggtgcatcagggggcaaaatcgataattctgtgttagtccttattgtgggcttatcaacagtaggagctggtgcctatgcctacaagactatgaaagaggatgaaaaaagatacaatgaaagaatttcagggttagggctgacaccagaacagaaacagaaaaaggccgcgttatctgcttcagaaggagaggaagttcctcaagacaaggcgccaagtcatgttcctttcctgctaattggtggaggcacagctgcttttgctgcagccagatccatccgggctcgggatcctggggccagggtactgattgtatctgaagatcctgagctgccgtacatgcgacctcctctttcaaaagaactgtggttttcagatgacccaaatgtcacaaagacactgcgattcaaacagtggaatggaaaagagagaagcatatatttccagccaccttctttctatgtctctgctcaggacctgcctcatattgagaatggtggtgtggctgtcctcactgggaagaaggtagtacagctggatgtgagagacaacatggtgaaacttaatgatggctctcaaataacctatgaaaagtgcttgattgcaacaggaggtactccaagaagtctgtctgccattgatagggctggagcagaggtgaagagtagaacaacgcttttcagaaagattggagactttagaagcttggagaagatttcacgggaagtcaaatcaattacgattatcggtgggggcttccttggtagcgaactggcctgtgctcttggcagaaaggctcgagccttgggcacagaagtgattcaactcttccccgagaaaggaaatatgggaaagatcctccccgaatacctcagcaactggaccatggaaaaagtcagacgagagggggttaaggtgatgcccaatgctattgtgcaatccgttggagtcagcagtggcaagttacttatcaagctgaaagacggcaggaaggtagaaactgaccacatagtggcagctgtgggcctggagcccaatgttgagttggccaagactggtggcctggaaatagactcagattttggtggcttccgggtaaatgcagagctacaagcacgctctaacatctgggtggcaggagatgctgcatgcttctacgatataaagttgggaaggaggcgggtagagcaccatgatcacgctgttgtgagtggaagattggctggagaaaatatgactggagctgctaagccgtactggcatcagtcaatgttctggagtgatttgggccccgatgttggctatgaagctattggtcttgtggacagtagtttgcccacagttggtgtttttgcaaaagcaactgcacaagacaaccccaaatctgccacagagcagtcaggaactggtatccgatcagagagtgagacagagtccgaggcctcagaaattactattcctcccagcaccccggcagttccacaggctcccgtccagggggaggactacggcaaaggtgtcatcttctacctcagggacaaagtggtcgtggggattgtgctatggaacatctttaaccgaatgccaatagcaaggaagatcattaaggacggtgagcagcatgaagatctcaatgaagtagccaaactattcaacattcatgaagactgaagccccacagtggaattggcaaacccactgcagcccctgagaggaggtcgaatgggtaaaggagcatttttttattcagcagactttctctgtgtatgagtgtgaatgatcaagtcctttgtgaatattttcaactatgtaggtaaattcttaatgttcacatagtgaaataaattctgattcttctaaaaaaaaaaaaaaaaaaaaaaaaaaa

SEQ ID NO: 2560 - DNA, 911 bp, Homo sapiens
  misc_feature (887)..(887): n equals a,t,g, or c
  misc_feature (889)..(889): n equals a,t,g, or c
  misc_feature (902)..(903): n equals a,t,g, or c
gcgcagcagccaccgccgcgtccctctctccacgaggctgccggcttaggacccccagctccgacatgtcgccctctggtcgcctgtgtcttctcaccatcgttggcctgattctccccaccagaggacagacgttgaaagataccacgtccagttcttcagcagactcaactatcatggacattcaggtcccgacacgagccccagatgcagtctacacagaactccagcccacctctccaaccccaacctggcctgctgatgaaacaccacaaccccagacccagacccagcaactggaaggaacggatgggcctctagtgacagatccagagacacacaagagcaccaaagcagctcatcccactgatgacaccacgacgctctctgagagaccatccccaagcacagacgtccagacagacccccagaccctcaagccatctggttttcatgaggatgaccccttcttctatgatgaacacaccctccggaaacgggggctgttggtcgcagctgtgctgtcatcacaggcatcatcatcctcaccagtggcaagtgcaggcagctgtcccggktatgccggaatcattgcaggtgagtccatcagaaacaggagctgacaacccgctgggcacccgaagaccaagccccctgccagctcaccgtgcccagcctcctgcatcccctyraagagcctggccagagagggaagacacagatgatgaagctkgagccagggctgccggtccgagtctcctacctcccccaaccctgcccgcccctgaaggctacctggcgccttgggggctgtccctcaagttatctcctctgttaagacaaaaagtaaagcactgtggtctttgaaaaaaaaaaaaaaaaaactngngggggggcccggnncccaattt

SEQ ID NO: 2561 - DNA, 1226 bp, Homo sapiens
  misc_feature (121)..(121): n equals a,t,g, or c
  misc_feature (1198)..(1198): n equals a,t,g, or c
  misc_feature (1212)..(1212): n equals a,t,g, or c
tgtcccccaaaaggcccagcttttttttttttctccctggaaaggaagttycatwatgttscccaggcaggtctcaamctcctggcctcaaatgatcctcccacctcagcctcccaaggtnctgggattaccaggtgtgasccaccacgcccggcccagagaactttttttttactgcagaaaacatttttataactttagaacttttctaaaatactactttgtcagctgaacaatatagaaaagtgcagaggcaagtgcctttccagaaccgcgtggtgacttagaagcggggcttgcgcttgcggccggtgtactgggtgtcaggtctgacttccctgccctggcgcctgtgccgctccttcttctccagcacccatgcccgactcttcctcaccattccccgcctcgacatccttaatgggaacctctcattggtgaacacagactccctgggttcaacttcatcctgattttcactcagcccctctggtataaaggtcgaaggcccagaaaacaagcagaggtagaatttctttgctttggcactgttagggtagtctaccaccatgccaccggagaagcctgcctttgtggcctgggttgtgatcagctccaactgctctgagttctcagggtacagctgcaggacagctcgggatccccggacgagaacagaaaaaagagaagcaaaaaagcagtacaggcgcttggcagggttttcagacttcttgttagcattacagagccactgcacagcagaaatgctgatgcaaccatcaaatgtgcctggcttgaatgggatgccctggcccatatcccccagcagcaggtctccctctatctctcggtccacagcctcatccagcatggcagggctgatatccaggcccacccaatagtgcccttcatctgacagataacttccactcagcccagtgccacagccaatatccagcaggtaacagggcttattctctggcagataaagaagctccaatgctcgcccagccatcctggtctggatatcaatcatccgtgagttgcgaacgtatttccgggcttctgtctcgtcataaaacagctctgggggtccgccatgctccggacgccggccgcgggacgccattctcacgcctcagcagctcgtgccgaaatcctgcagcccgggggatccactagttctagagcgtccgcngccgcggtgcaganccattcttccggag

SEQ ID NO: 2562 - DNA, 1765 bp, Homo sapiens
  misc_feature (1754)..(1754): n equals a,t,g, or c
gttgacatgagggaaaggtcttaagacctttaagacatttaagaggaaaaatgagcccaaaatgcatgtgtttggaaggcccacagctgggcacagccatgcatgttcctcacgtccaccataggtttatgctgcctgaccccttgggtctttgctcatttcccttagtttccctagttcattccccatggggagctgggacccttctggatgacctcttctctgaggcgcccatctcgtgctcccagggagcactcccatctcctccctcccaggggaagtacacattgccttatctccatgtgtcttaggatccttcttgtccttacactggtgtcttcaaacgacatgtcctaaaagtaaatgtgggtaagttgaatgacctgagcatccattcctcagctattcaaaaagtaggggtagtgccacctatcttggcagtgtgttgagggtgcccagcacgtaccttgccatccctcgttctgtaggctctcacttccagttcctcagatgaggtacagggcagggaggagcttctcccgttactgtcatctcagtctaaccacattcaggacacttgtttattttaaataaacaggtgaattaagaaaaagttttttaagtctttacctaatcagtctccaggctctctttttggcctgttcctcccttcctcctggccgcctccctcccatgcctctcatgtgcctcctgcagggctgggcccccacttctcttgggacctgtgctttggggcactccccgtcttcacctccttcctttagctccattgatgactttcccccttgctgcttctcccatggctcayctcttgccccctggttcgccactctgccctcactttgtactctttgtagaatcttgagatgactcctcctgtgtccccagccctgctctgcagctgctcctgctttgtgctggctcatcaggctcaggcatccgaatggcagctccttggcttgccctgtctctggtttctacggatggtcacaggggtcttcggggttaccccgccctctttccttcttccctcatacccctcagtccttccttttcagcccctcctttccatccctgtcttcctgcccccaagctgtgggaccctaagctcctgctgtgaactgtcgactgtgctcttgaagtctaggtgatgatgtgtcattgcattggtagaaagcggcctgcttactgctgcttagctgcttcccgaagagggaacagactgctcgctggtgtttaggtctccatgcccggcccagctctctcctcctctgcccacccaacaacctctgtggcccggatggatgttatcaggaaggagggtgtccagagcggggaattgtgttatagggaaggtggagcatttgagagaaggggcatccgaggccaccagactcggaggtaagcttgccatggattcacatgggggccagtcgggcagccccatccatcagctgtccatcagctcatagctgtgtctccgccacaggttcccattaaggatgtcgaggcggggaatggtgaggaagagtcgggcatgggtgctggagaagaaggagcggcacaggcgccagggcagggaagtcagacctgacacccagtacaccggccgcaagcgcaagccccgcttctaagtcaccacgcggttctggaaaggcacttgcctctgcacttttctatattgttcagctgacaaagtagtattttagaaaagttctaaagttataaaaacnttttctgcagt

SEQ ID NO: 2563 - DNA, 1936 bp, Homo sapiens
ggcacgagttgacatgagggaaaggtcttaagacctttaagacatttaagaggaaaaatgagcccaaaatgcatgtgtttggaaggcccacagctgggcacagccatgcatgttcctcacgtccaccataggtttatgctgcctgaccccttgggtctttgctcatttcccttagtttccctagttcattccccatggggagctgggacccttctggatgacctcttctctgaggcgcccatctcgtgctcccagggagcactcccatctcctccctcccaggggaagtacacattgccttatctccatgtgtcttaggatccttcttgtccttacactggtgtcttcaaacgacatgtcctaaaagtaaatgtgggtaagttgaatgacctgagcatccattcctcagctattcaaaaagtaggggtagtgccacctatcttggcagtgtgttgagggtgcccagcacgtaccttgccatccctcgttctgtaggctctcacttccagttcctcagatgaggtacagggcagggaggagcttctcccgttactgtcatctcagtctaaccacattcaggacacttgtttattttaaataaacaggtgaattaagaaaaagttttttaagtctttacctaatcagtctccaggctctctttttggcctgttcctcccttcctcctggccgcctccctcccatgcctctcatgtgcctcctgcagggctgggcccccacttctcttgggacctgtgctttggggcactccccgtcttcacctccttcctttagctccattgatgactttcccccttgctgcttctcccatggctcacctcttgccccctggttcgccactctgccctcactttgtactctttgtagaatcttgagatgactcctcctgtgtccccagccctgctctgcagctgctcctgctttgtgctggctcatcaggctcaggcatccgaatggcagctccttggcttgccctgtctctggtttctacggatggtcacaggggtcttcggggttaccccgccctctttccttcttccctcatacccctcagtccttccttttcagcccctcctttccatccctgtcttcctgcccccaagctgtgggaccctaagctcctgctgtgaactgtcgactgtgctcttgaagtctaggtgatgatgtgtcattgcattggtagaaagcggcctgcttactgctgcttagctgcttcccgaagagggaacagactgctcgctggtgtttaggtctccatgcccggcccagctctctcctcctctgcccacccaacaacctctgtggcccggatggatgttatcaggaaggagggtgtccagagcggggaattgtgttatagggaaggtggagcatttgagagaaggggcatccgaggccaccagactcggaggtaagcttgccatggattcacatgggggccagtcgggcagccccatccatcagctgtccatcagctcatagctgtgtctccgccacaggttcccattaaggatgtcgaggcggggaatggtgaggaagagtcgggcatgggtgctggagaagaaggagcggcacaggcgccagggcagggaagtcagacctgacacccagtacaccggccgcaagcgcaagccccgcttctaagtcaccacgcggttctggaaaggcacttgcctctgcacttttctatattgttcagctgacaaagtagtattttagaaaagttctaaagttataaaaatgttttctgcagtaaaaaaaaagttctctgggccgggcgtggtggctcacacctgtaatcccagcaccttgggaggctgaggtgggaggatcatttgaggccaggagtttgagacctgcctgggcaacataatgaaacttcctttccagggagaaaaaaaaaaaaaaaaaaaaaaaa

SEQ ID NO: 2564 - DNA, 2029 bp, Homo sapiens; identical to SEQ ID NO: 1752

SEQ ID NO: 2565 - DNA, 1681 bp, Homo sapiens; identical to SEQ ID NO: 2520

SEQ ID NO: 2566 - DNA, 1535 bp, Homo sapiens
  misc_feature (14)..(14): n equals a,t,g, or c
gaattcggcacganctcgtgccgaattcggcacgagaacaagcagggtggcgcgggtccgggcatgaagctgggccgggccgtgctgggcctgctgctgctggcgccgtccgtggtgcaggcggtggagcccatcagcctgggactggccctggccggcgtcctcaccggctacatctacccgcgtctctactgcctcttcgccgagtgctgcgggcagaagcggagccttagccgggaggcactgcagaaggatctggacgacaacctctttggacagcatcttgcaaagaaaatcatcttaaatgccgtgtttggtttcataaacaacccaaagcccaagaaacctctcacgctctccctgcacgggtggacaggcaccggcaaaaatttcgtcagcaagatcatcgcagagaatatttacgagggtggtctgaacagtgactatgtccacctgtttgtggccacattgcactttccacatgcttcaaacatcaccttgtacaaggatcagttacagttgtggattcgaggcaacgtgagtgcctgtgcgaggtccatcttcatatttgatgaaatggataagatgcatgcaggcctcatagatgccatcaagcctttcctcgactattatgacctggtggatggggtctcctaccagaaagccatgttcatatttctcagcaatgctggagcagaaaggatcacagatgtggctttggatttctggaggagtggaaagcagagggaagacatcaagctcaaagacattgaacacgcgttgtctgtgtcggttttcaataacaagaacagtggcttctggcacagcagcttaattgaccggaacctcattgattattttgttcccttcctccccctggaatacaaacacctaaaaatgtgtatccgagtggaaatgcagtcccgaggctatgaaattgatgaagacattgtaagcagagtggctgaggagatgacatttttccccaaagaggagagagttttctcagataaaggctgcaaaacggtgttcaccaagttagattattactacgatgattgacagtcatgattggcagccggagtcactgcctggagttggaaaagaaacaacactcagtccttccacacttccacccccagctcctttccctggaagaggaatccagtgaatgttcctgtttgatgtgacaggaattctccctggcattgtttccaccccctggtgcctgcaggccacccagggaccacgggcgaggacgtgaagcctcccgaacacgcacagaaggaaggagccagctcccagcccactcatcgcagggctcatgattttttacaaattatgttttaattccaagtgtttctgtttcaaggaaggatgaataagttttattgaaaatgtggtaactttatttaaaatgatttttaacattatgagagactgctcagattctaaaaaaaaaaaaaaaaaaaaaaaaaaaaaaaaaaaaaaaaaaaaaaaaaaaaaaaggcaaaaaaaaaaaaaaaaaaaaaaaa

SEQ ID NO: 2567 - DNA, 1423 bp, Homo sapiens
ggcacgagcgggtccgggcatgaagctgggccgggccgtgctgggcctgctgctgctggcgccgtccgtggtgcaggcggtggagcccatcagcctgggactggccctggccggcgtcctcaccggctacatctacccgcgtctctactgcctcttcgccgagtgctgcgggcagaagcggagccttagccgggaggcactgcagaaggatctggacgacaacctctttggacagcatcttgcaaagaaaatcatcttaaatgccgtgtttggtttcataaacaacccaaagcccaagaaacctctcacgctctccctgcacgggtggacaggcaccggcaaaaatttcgtcagcaagatcatcgcagagaatatttacgagggtggtctgaacagtgactatgtccacctgtttgtggccacattgcactttccacatgcttcaaacatcaccttgtacaaggatcagttacagttgtggattcgaggcaacgtgagtgcctgtgcgaggtccatcttcatatttgatgaaatggataagatgcatgcaggcctcatagatgccatcaagcctttcctcgactattatgacctggtggatggggtctcctaccagaaagccatgttcatatttctcagcaatgctggagcagaaaggatcacagatgtggctttggatttctggaggagtggaaagcagagggaagacatcaagctcaaagacattgaacacgcgttgtctgtgtcggttttcaataacaagaacagtggcttctggcacagcagcttaattgaccggaacctcattgattattttgttcccttcctccccctggaatacaaacacctaaaaatgtgtatccgagtggaaatgcagtcccgaggctatgaaattgatgaagacattgtaagcagagtggctgaggagatgacatttttccccaaagaggagagagttttctcagataaaggctgcaaaacggtgttcaccaagttagattattactacgatgattgacagtcatgattggcagccggagtcactgcctggagttggaaaagaaacaacactcagtccttccacacttccacccccagctcctttccctggaagaggaatccagtgaatgttcctgtttgatgtgacaggaattctccctggcattgtttccaccccctggtgcctgcaggccacccagggaccacgggcgaggacgtgaagcctcccgaacacgcacagaaggaaggagccagctcccagcccactcatcgcagggctcatgattttttacaaattatgttttaattccaagtgtttctgtttcaaggaaggatgaataagttttattgaaaatgtggtaactttatttaaaatgatttttaacattatgagagactgctcagaaaaaaaaaaaaaaaaaaa

SEQ ID NO: 2568 - DNA, 2037 bp, Homo sapiens
  misc_feature (14)..(14): n equals a,t,g, or c
  misc_feature (383)..(383): n equals a,t,g, or c
  misc_feature (2030)..(2030): n equals a,t,g, or c
actcactaagggancaaagctggagctccaccgcggtggcggccgctctagaactagtggatcccccgggctgcaggaattcggcacgagatctaccgggagakggaytctgaaagggccccggccagcgtccctgagacgccaacggcagtcactgccccccattccagctcctgggatacgtactatcagccccgtgccctggagaaacatgctgacagcatgcctggcactggcttcagtattctggtccatctcttattactcctctcccttcgccttcttctacttgtacaggaaaggttacttgagtttgtccaaagtggtgccgttttctcactatgctgggacattgctgctacttctggcaggtgtggcctgcntccgaggcattggccgctggaccaacccccagtaccggcagttcatcaccatcttggaagcaacacatcggaaccagtcttcagaaaacaagaggcagcttgccaactacaactttgacttccggagctggccagtcgacttccactgggaagaacccagcagccggaaggagtctcgagggggcccttcccgccggggtgtggccctgcttcgcccagagcccctgcaccgggggacagcagacaccctcctcaaccgggttaagaagctgccttgtcagatcaccagctacctggtggcgcacaccctagggcgccggatgctgtatccaggctctgtgtacctgctgcagaaggccctcatgcctgtgctgctgcagggccaggcccgactggtggaagagtgtaatgggcgccgggcaaagctgctggcctgtgatggcaatgagattgacaccatgtttgtggaccggcgggggacagctgagccccagggacagaagctggtgatctgctgtgaggggaatgctgggttttatgaggtgggctgcgtctccacgcccctggaagctggatattcagtcctgggctggaatcatccaggctttgctggaagcacgggggtgccattcccgcagaatgaggctaatgccatggatgtggtggtccagtttgccatccaccgcctrggcttccagccccaggacatcatcatctacgcctggtccatcggcggcttcactgccacgtgggcagccatgtcctacccagatgttagtgccatgatcctggatgcctcctttgatgacctggtgcccttggccttgaaggtcatgccagacagctggaggggcctggtgaccaggaccgtgaggcagcatctcaatctaaacaacgcggagcagctgtgcagataccagggtcctgtactgctgatccggagaaccaaggatgagatcatcaccaccacggttcctgaggacatcatgtccaaccgaggcaatgacctcctgctgaagctcctgcagcatcggtatccccgggtgatggcagaggagggtcttcgagtggtgaggcagtggttggaggcctcctcacagctggaggaagcctcaatttatagccgatgggaggtggaagaggactggtgtctgtctgtcctccgctcctaccaggcagaacacgggcccgacttcccctggagcgtgggggaggacatgagtgcagatggacggcggcagctggctttgtttctggctcggaagcatctgcacaactttgaggccactcactgcaccccactcccagcccagaacttccagatgccctggcacctctagggaccaactgggactcattatggaagaatggggtgagaggagacatgaggaaagaccctcttatttgtgattctctgtgttcatgttgctgtttatagtttgtggaaagtgggggaccatcccccttctcaccactgttcctcttgcacgtttcccctcattcatgtggctgtacttaaccttctccaacatacatcctgcattacatgaatggattattcctaataattaataaaaaggtattttttctacwaaaaaaaaaaaaaaaaaaactcgcagaattacttcctaaaaccggcccgcgggncccatcc

SEQ ID NO: 2569 - DNA, 3061 bp, Homo sapiens
  misc_feature (2755)..(2755): n equals a,t,g, or c
  misc_feature (2849)..(2849): n equals a,t,g, or c
  misc_feature (2919)..(2919): n equals a,t,g, or c
  misc_feature (2983)..(2983): n equals a,t,g, or c
  misc_feature (2987)..(2987): n equals a,t,g, or c
  misc_feature (2998)..(2998): n equals a,t,g, or c
  misc_feature (3027)..(3027): n equals a,t,g, or c
gtgtgggggccaccttcggtggcggccgctctagaactagtggatcccccgggctgcagggaattcggcacgagcaacattgaagaccgggacgagcttgcctaccacatcagcatcatgttctatataataggaggtgtggccactctcctcctcatccttgtcatcattgtgttcaaggagaaacctaaatatccccccagcagggcccaatccctgagctatgccttgacctctcctgatgcctcatacttaggttccatcgcccggctcttcaaaaatctcaactttgtgctgcttgtcatcacctatggtctgaatgctggtgctttttatgccttgtccactcttctgaatcgcatggtgatctggcactacccgggggaagaagtgaatgctggaagaattggcctgacgatcgtcattgcaggaatgcttggggctgtgatctcaggaatctggctggataggtccaaaacctacaaagagacaaccctggtagtctatatcatgacactggtgggcatggtggtgtacacgtttaccttgaacctgggacacctgtgggtagtgttcatcactgctggcacaatgggcttctttatgactggctatctcccactgggatttgagtttgctgtggagctcacgtacccagaatcagaaggcatctcctccggcctcctcaacatatctgcacaggtatttgggatcatctttaccatctcccagggccagattattgacaactatggaaccaagcctgggaacatcttcctgtgtgtgttccttactcttggagcagccctcactgcattcattaaggcagatctccggagacagaaagcaaacaaagaaactcttgagaacaaactccaagaggaggaggaggagagcaacaccagcaaagtgcccactgctgtgtcagaggatcatctctgagaggaaggtggtgacaactcagggaacacgaacaccccaccttttccttcagcacagctctcaccgccagcacaaagggcttcgctagagatgtttttggagggaatcagtgggactatttgtggcatggatggcctattcctcctagaacccacgtaagagcttggatgatttagttggagaaaattgcacctatcaccaaatgcaaatttgattcccacctccacccccttttaggttatgggagttggtgttgggacagggtggcagagaatattggagtcaatcctagcttggtctcttgccttccctcttttcctccatccatcgtggacaatgcctgcaaaattttcacaggaagaaagcctattcaggatattaacttgaaatttccagtgtcctaagagcctctcatgaagcccagttctaataagtggcaagctgctctgccggggtcatctcctgggtcatcggactgattgctcaagttctgcaggagaggaagcaccattagaacaactccatcagaacagctccaccgggacttgtgggcctaaattttcctggcctaacgggtctgtctccaaaccctctttcctaagagctgagcaaaccaaccataataaacttgacaaaagactttgttgtggccatgacagagataccgactcaggagggctacctacctaggtgtgatcatgctgggggctaccttctgagtatatttgtgaaagcacatatttgggaactctggtagcttgagttgggaatgggaaggttcttttttacagaagtacttccccagggacttctgtgtgtcacagtcacctctgatgcctttatcttgatgttgcattgggaatctcagccatcagcccaagtgcttgttttattccaaggcagggtaatccccgtcaacttactctaacctttgctgaaaactaatcttgattcattctactctgaaaatccaaaggtgcttctgagagataagagggaaggggtagaaggaaaggtgccccttgaaatgggaattgagcctgttagaattaaaagcttatctcacctctgctggggacagtatttgcaccaccaacccctctcctcacctgctttgagcgataatctttatcagatattctaaacttaaagggattccctttaaaccaactcaagctgatctttcctatctagcctgctgtttggctgtactcatgggctttggtaatatctcctaaaaatgaggttttggtaatttttcctatgcattgggcaactgtgatcgtgaccactgtgctgtcttgctccagccactgccctggcctcagcatatcagggcagcctgtgctggctgcaatactgtggtgcttgggccactgcctgagaggagccaggtttgtgtgtgtctgcatgtgtgtgtgtgtgtgtttgtacagattcaagcaatggatgcaaggaacatgctgtatgtaatagaagaaagaagtccacgttttcggcagaagtagtgagtcagtgtggaagagaggtgagggtgtgctttactttttgataaagagaaagatgtttactcataaacccttcaaaaggtattaacaaaatgtttaccaaacctattgctttattttaaaaacataatttgtgttttctatttgtaagatctgacatttcgaggcaataaaaacttctcagaaaaaaaaaaaaaaaaaaaaactcgagggggggcccggtacccaattcgccctatagtgagtcgtattacaattcactggccgtcgttttacaacgtcgtgactgggaaaaccctggcgtnacccaacttaatcgccttgcagcacatccccctttcgccagctggcgtaatagcgaagaggcccgcaccgatcgcccttcccaacagttgcgcngcctgaatgggcgaatggcaaattgtaagcgttaatattttggttaaaattcgcgttaaatttttgtttnaatcagctcattttttaaccaataggccgaaatcggcaaaatcccttattaatcaaaagaatanaccnaaatagggttnaatgttgttccatttggaacaagagtccnctattaaagacgtggactccacgtcaaagggcga

SEQ ID NO: 2570 - DNA, 1040 bp, Homo sapiens
gcatggcccgggggccgctggccgcccgcggactgcggctgctgctgccgctcctgccgctcctgccgctgccgcaggtgggtcgggcggcgttctctctcggttcggcmaccgcggggcgggtccctgytckkaccacgcccctcccgggctcacccttgtccccacaggtggcgctgggcttcgcggacggcagctgcgacccctcggaccagtgcccgccccaggcccgctggagcagcctgtggcacgtggggctcatcctgctggcggtcctcctgcttctgctgtgtggtgtcacagctggttgtgtccggttctgctgcctccggaagcaggcacaggcccagccacatctgccaccagcacggcagccctgcgacgtggcagtcatccctatggacagtgacagccctgtacacagcactgtgacctcctacagctccgtgcagtacccactgggcatgcggttgcccctgccctttggggagctggacctggactccayggctcctcctgcctacagcctgtacaccccggagcctccaccctcctacgatgaagctgtcaagatggccaagcccagagaggaaggaccagcactctcccagaaacccagccctctccttggggcctcgggcctagagaccactccagtgccccaggagtcgggccccaatactcaactaccaccttgtagccctggtgccccttgaaggaggtaggagaacggaccagagcttggagaactaatgcttggagccaagggccccagcccaccccaccgtcccacacattgctgtggccccaacctcggtgccatgttacaccggcccctggcgtcacccactaggcaggctgctgctttcagcctcagcccctggcccagccccagcaggccctcagcctggaagaggccccttgggcctaagcctcgggtgggagctcagggccacctgtgacgtctgcatcttcttggagagagaataaagtttgtatttaagtggaaaaaaaactgcactcctccttaccacaaaatg

SEQ ID NO: 2571 - DNA, 1533 bp, Homo sapiens; identical to SEQ ID NO: 2304
  misc_feature (11)..(11): n equals a,t,g, or c
  misc_feature (14)..(14): n equals a,t,g, or c
  misc_feature (27)..(27): n equals a,t,g, or c
  misc_feature (1523)..(1523): n equals a,t,g, or c
  misc_feature (1525)..(1525): n equals a,t,g, or c
  misc_feature (1532)..(1533): n equals a,t,g, or c

SEQ ID NO: 2572 - DNA, 1183 bp, Homo sapiens; identical to SEQ ID NO: 2305

SEQ ID NO: 2573 - DNA, 789 bp, Homo sapiens
  misc_feature (1)..(1): n equals a,t,g, or c
  misc_feature (8)..(8): n equals a,t,g, or c
ngccgccngcttctagaactaagtgaatccccccgggctgcaggaatttcggcacgaagaacaggacagggagaccttgtgatggcggggcagggagcctgttcgtagggaagatgaggaggcaagggctgcctctcacacctccaggttctctaagttctggggagggagcgccccacctgctgaggtcggtcctctcagccctgcctgccctggcctgggctctcccagcctcccagccctctgccccctcagatggctttttgtttttgtttttttttgcatccatcagagactgcacctctgtgtggcaggcagggcatgggttttagtcctggccactgaccagctgtgtggccctggccgagtcgtagccccctggagcccagcttccatttctataaaatggttgtttcgggagagaggggcaggctttctgtgtgactcgggagttcttccgtgagggctgccagggggtggtgtgccaggacctcaggctgggcctttgtgctggccttgcagtgggtgtgtggggaagtcactgtcccactatgggtctccactacccagtcactgaccctgggagaccccttctgtgtgggagggagcgggggctggctagcgggccccccagccagggatcccagaggctgagggttggggagaggaagccatcatctcattacctctgtcagtgcaggggtggctgctgcttcccttgtgcacttgggtcgctgtgattgtgaataaaagtgatttcgtaccaaaaaaaaaaaaaaaaaactcgag

SEQ ID NO: 2574 - DNA, 1303 bp, Homo sapiens
gctactaaagggacaaaagctggagctccaccgcggtggcggccgctctagaactagtggatcccccgggctgcaggaattcggcacgagggaaaccccagagggtgtccagttggaccagggagatattagacacttaacagtattttcagtctgtccatctctttattccaatgtgagaaatggaagtgtttttttttttacgtttattggctcttcatatttctctacattatttttaatgtgcagtttcttcaattggttagtatttccatactatttgcaactttatggcctttaaatataggacatattatatagcagaaattttgactttaaatcctcttgagtagtatattttgagaagaaaagctatactgctcttctggatggtttccatcctttatttaggtcttttctttttgaattcaagtgttttgtatgcttagaaagtagacatgtataatattgagatcggttatttctgagctggaaattggaaactttggaaactcaggaaattgctctgacaatgttttaactgctctcaatttaagaaaatgacgaaatgtataaaaaagacaaaaataacgtgtgctgttttttccaagtgctttttctaagtgcttttccattgtgcaatgaggtgaagtttggtaatttttcggtgtagtagttaaatattgctcaatttttatttacatgtaaagaaaacagatttaaatgtttatgtggccaaaaggtgtcatttaaaaggtaaaataagtttatgtagaatgtatgttcatggtgcttatttttaaaatgtaattcaagtttacagtattacttaatgcttctttacagaatttaatagagaaacaaggctagaacacatctacatcctgaagagccgtttataacttcatattatatgatgacaaagttcattattttccttaaagttgagcaattgacttttatggtccaatgatgaacttattattaataaatgattgagttaactgtgaggcttctcattaaaatacaatattgcagctatcagttggagaatatattataaaattttcagacagtatatcagaaaaatgtttttatttgtactgtatagaaaatgtaattttgctgttaactctgtactttttaaattgaaaatgttttataaatttgcttttaaattttcttatgaagccatttgcaaattacatacttaatttaataaaatactttagccacaaaaaaaaaaaaaaaaaaaaaaaaaaaaaaaaaaaaaaaaactcgagggggggcccggtacccaatt

SEQ ID NO: 2575 - DNA, 1084 bp, Homo sapiens
ggcacgagatcgttttcttcgcctccatagggctccacgtgttccccacgtttgtggcgtacgagctcacggtgctggtgttcctcaccttgtcagtggtggtgatgaagtttctcctggcggcgctggtcctgtctctcattctgccgaggagcagccagtacatcaagtggatcgtctctgcggggcttgcccaggtcagcgagttttcctttgtcctggggagccgggcgcgaagagcgggcgtcatctctcgggaggtgtacctccttatactgagtgtgaccacgctcagcctcttgctcgccccggtgctgtggagagctgcaatcacgaggtgtgtgcccagaccggagagacggtccagcctctgatggctcggagatgatggaccgtggaagggaagcgtctgtggggagtgagcgcttagatggccagcagctgctccttctgggaagctcgcaccttggcaacagaacagccctctagcagagcgtcagtgcagtcgtgttatcccggcttttacagaatattcttgtcctattttagaattttccggagtagtttatttgcagtctgttgattatgtgcagtagacccgggacactgcgttttaccgatcaccttgaatgtggtgcctggatgtgcctttttttttttttccctgaaattattattaattttctattgtgagttcatcagttcatagtttttttagtaaagaagcaaaattaaaaggcttttaaaaatgtacaacttcagaattataatctgttagtcaaatatttgttattaaacatttctgtaatatgaagttgtaatcctggccgtgagcttggaagcttacttttgattcttaaagcctatgttttctaaaatgagacaaatacggatgtctatttgccttttattgtaacttttaaatgaaataatttcatgtcaatttctattagatatatcacttaaaatatttggttttaaatcacaagaatatgtattctttaataaagataatttatgatcatggtataattaattgaaatttatataaatctgtttttattaaaaaaaaaaaaaaaaaaaa

SEQ ID NO: 2576 - DNA, 2113 bp, Homo sapiens
gggagacccccctattcctggccgcccgcgagggcagctatgaggctgccaagctgctgttggaccactttgccaaccgtgagatcaccgaccacctggacaggctgccgcgggacgtagcccaggagagactgcaccaggacatcgtgcgcttgctggatcaacccagtgggccccgcagcccccccggtccccacggcctggggcctctgctctgtcctccaggggccttcctccctggcctcaaagcggcacagtcggggtccaagaagagcaggaggccccccgggaaggcggggctggggccgcaggggccccgggggcggggcaagaagctgacgctggcctgcccgggccccctggctgacagctcggtcacgctgtcgcccgtggactcgctggactccccgcggcctttcggtgggccccctgcttcccctggtggcttcccccttgaggggccctatgcagctgccactgccactgcagtgtctctggcacagcttggtggcccaggccgggcgggtctagggcgccagccccctggaggatgtgtactcagcctgggcctgctgaaccctgtggctgtgcccctcgattgggcccggctgcccccacctgcccctccaggcccctcgttcctgctgccactggcgccgggaccccagctgctcaacccagggacccccgtctccccgcaggagcggcccccgccttacctggcagtcccaggacatggcgaggagtacccggyggctggggcacacagcagccccccaaaggcccgcttcctgcgggttcccagtgagcacccttacctgaccccatcccccgaatcccctgagcactgggccagcccctcacctccctccctctcagactggtccgaatccacgcctagcccagccactgccactggggccatggccaccaccactggggcactgcctgcccagccacttcccttgtctgttcccagctcccttgctcaggcccagacccagctggggccccagccggaagttacccccaagaggcaagtgttggcctgagacgctcgtcagttcttagatcttgggggcctaaagagacccccgtcctgcctcctttctttctctgtctcttccttccttttagtctttttcatcctcttctctttccaccaaccctcctgcatccttgccttgcagcgtgaccgagataggtcatcagcccagggcttcagtcttcctttatttataatgggtgggggctaccacccaccctctcagtcttgtgaagagtctgggacctccttcttccccacttctctcttccctcattcctttctctctccttctggcctctcatttccttacactctgacatgaatgaattattattatttttctttttctttttttttttacattttgtatagaaacaaattcatttaaacaaacttattattattattttttacaaaatatatatatggagatgctccctccccctgtgaaccccccagtgcccccgtggggctgagtctgtgggcccattcggccaagctggattctgtgtacctagtacacaggcatgactgggatcccgtgtaccgagtacacgacccaggtatgtaccaagtaggcacccttgggcgcacccactggggccaggggtcgggggagtgttgggagcctcctccccaccccacctccctcacttcactgcattccagattggacatgttccatagccttgctggggaagggcccactgccaactccctctgccccagccccacccttggccatctccctttgggaactagggggctgctggtgggaaatgggagccagggcagatgtatgcattcctttatgtccctgtaaatgtgggactacaagaagaggagctgcctgagtggtactttctcttcctggtaatcctctggcccagccttatggcagaatagaggtatttttaggctatttttgtaatatggcttctggtcaaaatccctgtgtagctgaattcccaagccctgcattgtacagccccccactcccctcaccacctaataaaggaatagttaacactcaaaaaaaaaaaaaaaaaaaaacttgaggggggg

SEQ ID NO: 2577 - DNA, 2648 bp, Homo sapiens; identical to SEQ ID NO: 1829
  misc_feature (36)..(36): n equals a,t,g, or c
  misc_feature (94)..(94): n equals a,t,g, or c
  misc_feature (130)..(130): n equals a,t,g, or c
  misc_feature (2526)..(2526): n equals a,t,g, or c
  misc_feature (2565)..(2565): n equals a,t,g, or c

SEQ ID NO: 2578 - DNA, 1601 bp, Homo sapiens
  misc_feature (1597)..(1597): n equals a,t,g, or c
  misc_feature (1601)..(1601): n equals a,t,g, or c
gagcaggagagaaggcaccgcccccaccccgcctccaaagctaaccctcgggcttgaggggaagaggctgactgtacgttccttctactctggcaccactctccaggctgccatggggcccagcacccctctcctcatcttgttccttttgtcatggtcgggacccctccaaggacagcagcaccaccttgtggagtacatggaacgccgactagctgctttagaggaacggctggcccagtgccaggaccagagtagtcggcatgctgctgagctgcgggacttcaagaacaagatgctgccactgctggaggtggcagagaaggagcgggaggcactcagaactgaggccgacaccatctccgggagagtggatcgtctggagcgggaggtagactatctggagacccagaacccagctctgccctgtgtagagtttgatgagaaggtgactggaggccctgggaccaaaggcaagggaagaaggaatgagaagtacgatatggtgacagactgtggctacacaatctctcaagtgagatcaatgaagattctgaagcgatttggtggcccagctggtctatggaccaaggatccactggggcaaacagagaagatctacgtgttagatgggacacagaatgacacagcctttgtcttcccaaggctgcgtgacttcacccttgccatggctgcccggaaagcttcccgagtccgggtgcccttcccctgggtaggcacagggcagctggtatatggtggctttctttattttgctcggaggcctcctggaagacctggtggaggtggtgagatggagaacactttgcagctaatcaaattccacctggcaaaccgaacagtggtggacagctcagtattcccagcagaggggctgatccccccctacggcttgacagcagacacctacatcgacctggcagctgatgaggaaggtctttgggctgtctatgccacccgggaggatgacaggcacttgtgtctggccaagttagatccacagacactggacacagagcagcagtgggacacaccatgtcccagagagaatgctgaggctgcctttgtcatctgtgggaccctctatgtcgtctataacacccgtcctgccagtcgggcccgcatccagtgctcctttgatgccagcggcaccctgacccctgaacgggcagcactyccttawtttccccgcagatatggtgcccatgccagcctccgctataacccccgagaacgccagctctatgcctgggatgatggctaccagattgtctataagctggagatgaggaagaaagaggaggaggtttgaggagctagccttgktttttgcatctttctcactcccatacatttatattatatccccactaaatttcttgktcctcawtcttcaaatgtgggccagttgtggctcaaatcctctatatttttagccaatggcaatcaaattctttcagctcctttgtttcatacggaactccagatcctgagtaatccttttagagcccgaagagtcaaaaccctcaatgttccctcctgctctcctgccccatgtcaacaaatttcaggctangagn

SEQ ID NO: 2579 - DNA, 1851 bp, Homo sapiens
aattcggcacgagcaggagagaaggcaccgcccccaccccgcctccaaagctaaccctcgggcttgaggggaagaggctgactgtacgttccttctactctggcaccactctccaggctgccatggggcccagcacccctctcctcatcttgttccttttgtcatggtcgggacccctccaaggacagcagcaccaccttgtggagtacatggaacgccgactagctgctttagaggaacggctggcccagtgccaggaccagagtagtcggcatgctgctgagctgcgggacttcaagaacaagatgctgccactgctggaggtggcagagaaggagcgggaggcactcagaactgaggccgacaccatctccgggagagtggatcgtctggagcgggaggtagactatctggagacccagaacccagctctgccctgtgtagagtttgatgagaaggtgactggaggccctgggaccaaaggcaagggaagaaggaatgagaagtacgatatggtgacagactgtggctacacaatctctcaagtgagatcaatgaagattctgaagcgatttggtggcccagctggtctatggaccaaggatccactggggcaaacagagaagatctacgtgttagatgggacacagaatgacacagcctttgtcttcccaaggctgcgtgacttcacccttgccatggctgcccggaaagcttcccgagtccgggtgcccttcccctgggtaggcacagggcagctggtatatggtggctttctttattttgctcggaggcctcctggaagacctggtggaggtggtgagatggagaacactttgcagctaatcaaattccacctggcaaaccgaacagtggtggacagctcagtattcccagcagaggggctgatccccccctacggcttgacagcagacacctacatcgacctggcagctgatgaggaaggtctttgggctgtctatgccacccgggaggatgacaggcacttgtgtctggccaagttagatccacagacactggacacagagcagcagtgggacacaccatgtcccagagagaatgctgaggctgcctttgtcatctgtgggaccctctatgtcgtctataacacccgtcctgccagtcgggcccgcatccagtgctcctttgatgccagcggcaccctgacccctgaacgggcagcactcccttattttccccgcagatatggtgcccatgccagcctccgctataacccccgagaacgccagctctatgcctgggatgatggctaccagattgtctataagctggagatgaggaagaaagaggaggaggtttgaggagctagccttgttttttgcatctttctcactcccatacatttatattatatccccactaaatttcttgttcctcattcttcaaatgtgggccagttgtggctcaaatcctctatatttttagccaatggcaatcaaattctttcagctcctttgtttcatacggaactccagatcctgagtaatccttttagagcccgaagagtcaaaaccctcaatgttccctcctgctctcctgccccatgtcaacaaatttcaggctaaggatgacccagacccagggctctaaccttgtatgcgggcaggcccagggagcaggcagcagtgttcttcccctcagagtgacttggggagggagaaataggaggagacgtccagctctgtcctctcttcctcactcctcccttcagtgtcctgaggaacaggactttctccacattgttttgtattgcaacattttgcattaaaaggaaaatccactaaaaaaaaaaaaaaaaaaaaaaaaaaa

SEQ ID NO: 2580 - DNA, 1897 bp, Homo sapiens
cccccgggctgcaggaattcggcacgagcaggagagaaggcaccgcccccaccccgcctccaaagctaaccctcgggcttgaggggaagaggctgactgtacgttccttctactctggcaccactctccaggctgccatggggcccagcacccctctcctcatcttgttccttttgtcatggtcgggacccctccaaggacagcagcaccaccttgtggagtacatggaacgccgactagctgctttagaggaacggctggcccagtgccaggaccagagtagtcggcatgctgctgagctgcgggacttcaagaacaagatgctgccactgctggaggtggcagagaaggagcgggaggcactcagaactgaggccgacaccatctccgggagagtggatcgtctggagcgggaggtagactatctggagacccagaacccagctctgccctgtgtagagtttgatgagaaggtgactggaggccctgggaccaaaggcaagggaagaaggaatgagaagtacgatatggtgacagactgtggctacacaatctctcaagtgagatcaatgaagattctgaagcgatttggtggcccagctggtctatggaccaaggatccactggggcaaacagagaagatctacgtgttagatgggacacagaatgacacagcctttgtcttcccaaggctgcgtgacttcacccttgccatggctgcccggaaagcttcccgagtccgggtgcccttcccctgggtaggcacagggcagctggtatatggtggctttctttattttgctcggaggcctcctggaagacctggtggaggtggtgagatggagaacactttgcagctaatcaaattccacctggcaaaccgaacagtggtggacagctcagtattcccagcagaggggctgatccccccctacggcttgacagcagacacctacatcgacctggcagctgatgaggaaggtctttgggctgtctatgccacccgggaggatgacaggcacttgtgtctggccaagttagatccacagacactggacacagagcagcagtgggacacaccatgtcccagagagaatgctgaggctgcctttgtcatctgtgggaccctctatgtcgtctataacacccgtcctgccagtcgggcccgcatccagtgctcctttgatgccagcggcaccctgacccctgaacgggcagcactcccttattttccccgcagatatggtgcccatgccagcctccgctataacccccgagaacgccagctctatgcctgggatgatggctaccagattgtctataagctggagatgaggaagaaagaggaggaggtttgaggagctagccttgttttttgcatctttctcactcccatacatttatattatatccccactaaatttcttgttcctcattcttcaaatgtgggccagttgtggctcaaatcctctatatttttagccaatggcaatcaaattctttcagctcctttgtttcatacggaactccagatcctgagtaatccttttagagcccgaagagtcaaaaccctcaatgttccctcctgctctcctgccccatgtcaacaaatttcaggctaaggatgacccagacccagggctctaaccttgtatgcgggcaggcccagggagcaggcagcagtgttcttcccctcagagtgacttggggagggagaaataggaggagacgtccagctctgtcctctcttcctcactcctcccttcagtgtcctgaggaacaggactttctccacattgttttgtattgcaacattttgcattaaaaggaaaatccactaaaaaaaaaaaaaaaaaaaaaaaaaaactcgagggggggcccggtacccaattcgccc

SEQ ID NO: 2581 - DNA, 1545 bp, Homo sapiens
  misc_feature (1111)..(1111): n equals a,t,g, or c
  misc_feature (1122)..(1122): n equals a,t,g, or c
  misc_feature (1182)..(1182): n equals a,t,g, or c
cgctgctactgtggctgttgccgcgtttaccagcattagcgcgccggatatgaaggtcaacgatcgtgtcgcggctgaacgccaacatgtgctggcgtttgccctcgcgggcggcgtgctgctgttgatggctgtggtggtggcgctgtcgtttggtcgtgatgcgcacggctggacgtgggcgagcggggcgttgctcgaggatttaatgccctggcgctggccgcgaattatggcggcgctgtttgcgggcstcatgctggcggtkgcgggctgtattattcascractgaccggaaacccratggcaagcccggaagtgctggggattagctccggcgcggcgtttggcgtggtgttgatgctgtttctggtgccgggtaatgcctttggctggctgttacctgcaggcagtctcggcgcgscggtgacgctgttgatcattatgatcgccgccggccgcggtggattttccccacaccgtatgttactggcggggatggcgttaagcaccgcgttcaccatgcttttgatgatgttgcaggcaagtggtgacccgcgaatggcgcaagtgctgacctggatttccggttcgacctacaacgcgaccgatgcgcaggtctggcgcaccggaattgtatggtattttgctgcgattaccccgctgtsccgcgctggctgaccattttaccgctgggtggtgataccgcccgagccgtaggaatggcgctgacgccgacgcgaattgcgctgctgctgttagcggcttgcctgacggcgaccgcgacgatgactattggaccgttgagttttgttggtttaatggcaccgcatattgcgcggatgatgggctttcgacggacgatgccacacatcgtaatttcggcgctggtgggtggtttactgctggtgttcgctgactggtgtgggcggatggtgctgtttccattccagatcccggcggggctgctgtcaacctttatcggcgcgccatattttatctatttgttgagaaagcagagccgttaatttttccatataacggccctgtacgcctggacggataaagcgtttacgcgacaacggatgcccgatgcgacgctggcgcgtnttatcgggccnacaaacggccccgaattgtaggtcggataaggcgttcacgccgcatccgacaaaccatgntggatcacaacttcgcaaacacccgacgtgcagcatcgatggtgttattgatatcttccatgctgtgcgccacggacataaagcccgcttcaaacgctgacggtgccaggtaaacaccttcgtccagcatcatatggaagaaacgyttaaagcgttccacgtcacaggccatcacatcctgatagcacgtcacggactcggcgtcggtaaagaaaataccgaacatgccgccaacgtggttaacgaccagcggaattccggcttcttctgccgcttccagcagaccttttgccagacgtgttgtcagctcatccagcgtttcgtgaacgcccggctgcgcgacttcattcagacaggcgaaac

SEQ ID NO: 2582 - DNA, 2170 bp, Homo sapiens
  misc_feature (2153)..(2153): n equals a,t,g, or c
  misc_feature (2158)..(2158): n equals a,t,g, or c
  misc_feature (2160)..(2160): n equals a,t,g, or c
  misc_feature (2163)..(2163): n equals a,t,g, or c
cgagaacagatcatcgctaaacagcagctgaaggtcaggcgaactgactcgctgcggaatctgcctttgcacgtgatcagtcggacgtctacacccgcagccgtcttctgtctccgcctcaccctcaggcctgacggtccgagtggagctgcgggacagcccgaacctccaggtcagccccgcggccctccatggcgctggtgcgcgcactcgtctgctgcctgctgactgcctggcactgccgctccggcctcgggctgcccgtggcgcccgcaggcggcaggaatcctcctccggcgataggacagttttggcatgtgactgacttacacttagaccctacttaccacatcacagatgaccacacaaaagtgtgtgcttcatctaaaggtgcaaatgcctccaaccctggcccttttggagatgttctgtgtgattctccatatcaacttattttgtcagcatttgattttattaaaaattctggacaagaagcatctttcatgatatggacaggggatagcccacctcatgttcctgtacctgaactctcaacagacactgttataaatgtgatcactaatatgacaaccaccatccagagtctctttccaaatctccaggttttccctgcgctgggtaatcatgactattggccacaggatcaactgcctgtagtcaccagtaaagtgtacaatgcagtagcaaacctctggaaaccatggctagatgaagaagctattagtactttaaggaaaggtggtttttattcacagaaagttacaactaatccaaaccttaggatcatcagtctaaacacaaacttgtactacggcccaaatataatgacactgaacaagactgacccagccaaccagtttgaatggctagaaagtacattgaacaactctcagcagaataaggagaaggtgtatatcatagcacatgttccagtggggtatctgccatcttcacagaacatcacagcaatgagagaatactataatgagaaattgatagatatttttcaaaaatacagtgatgtcattgcaggacaattttatggacacactcacagagacagcattatggttctttcagataaaaaaggaagtccagtaaattctttgtttgtggctcctgctgttacaccagtgaagagtgttttagaaaaacagaccaacaatcctggtatcagactgtttcagtatgatcctcgtgattataaattattggatatgttgcagtattacttgaatctgacagaggcgaatctaaagggagagtccatctggaagctggagtatatcctgacccagacctacgacattgaagatttgcagccggaaagtttatatggattagctaaacaatttacaatcctagacagtaagcagtttataaaatactacaattacttctttgtgagttatgacagcagtgtaacatgtgataagacatgtaaggcctttcagatttgtgcaattatgaatcttgataatatttcctatgcagattgcctcaaacagctttatataaagcacaattactagtatttcacagtttttgctaatagaaaatgctgattctgattctgagatcaatttgtgggaattttacataaatctttgttaattactgagtgggcaagtagacttcctgtctttgctttctttttttttttctttttgatgccttaatgtagatatctttatcattctgaattgtattatatatttaaagtgctcattaatagaatgatggatgtaaattggatgtaaatattcagtttatataattatatctaatttgtacccttgttgaaattgtcatttatacaataaagcgaattctttatctctaaaaaaaaaaaaaaagggcggccgctctagaggatccaagcttacgtacgcgtgcatgcgacgtcatagctcttctatagkgtcacctaaattcaattcactggccgtcgttttacaacgtcgtgactgggaaaaccctggcgttacccaacttaatcgccttgcagcacatccccctttcgccagctggccgtaatagcgaagaggcccgcaccgatcgcccttcccaacagttgcgcaagcctgaatggcgaatgggacgcgccctgtagcggcgcattaagcgcggcnggctngncgngggttac

SEQ ID NO: 2583 - DNA, 830 bp, Homo sapiens
cgcctcaccctcaggcctgacggtccgagtggagctgcgggacagcccgaacctccaggtcagccccgcggccctccatggcgctggtgcgcgcactcgtctgctgcctgytgactgcctggcactgccgctccggcctcgggctgcccgtggcgcccgcaggcggcaggaatcctcctccggcgatagggatagcccacctcatgttcctgtacctgaactctcaacagacactgttataaatgtgatcactaatatgacaaccaccatccagagtctctttccaaatctccaggttttccctgcgctgggtaatcatgactattggccacaggatcaactgcctgtagtcaccagtaaagtgtacaatgcagtagcaaacctctggaaaccatggctagatgaagaagctattagtactttaaggaaaggtggtttttattcacagaaagttacaactaatccaaaccttaggatcatcagtctaaacacaaacttgtactacggcccaaatataatgacactgaacaagactgacccagccaaccagtttgaatggctagaaagtacattgaacaactctcagcagaataaggagaaggtgtatatcatagcacatgttccagtggggtatctgccatcttcacagaacatcacagcaatgagagaatactataatgagaaattgatagatatttttcaaaaatacagtgatgtcattgcaggacaattttatggacacactcacagagacagcattatggttctttcagataaaaaaggaagtccagtaaattctttgtttgtggctcctgctgttacaccagtga

SEQ ID NO: 2584 - DNA, 1756 bp, Homo sapiens
ccacgcgtccggtccgagtggagctgcgggacagcccgaacctccaggtcagccccgcggccctccatggcgctggtgcgcgcactcgtctgctgcctgctgactgcctggcactgccgctccggcctcgggctgcccgtggcgcccgcaggcggcaggaatcctcctccggcgataggacagttttggcatgtgactgacttacacttagaccctacttaccacatcacagatgaccacacaaaagtgtgtgcttcatctaaaggtgcaaatgcctccaaccctggcccttttggagatgttctgtgtgattctccatatcaacttattttgtcagcatttgattttattaaaaattctggacaagaagcatctttcatgatatggacagggggatagcccacctcatgttcctgtacctgaactctcaacagacactgttataaatgtgatcactaatatgacaaccaccatccagagtctctttccaaatctccaggttttccctgcgctgggtaatcatgactattggccacaggatcaactgcctgtagtcaccagtaaagtgtacaatgcagtagcaaacctctggaaaccatggctagatgaagaagctattagtactttaaggaaaggtggtttttattcacagaaagttacaactaatccaaaccttaggatcatcagtctaaacacaaacttgtactacggcccaaatataatgacactgaacaagactgacccagccaaccagtttgaatggctagaaagtacattgaacaactctcagcagaataaggagaaggtgtatatcatagcacatgttccagtggggtatctgccatcttcacagaacatcacagcaatgagagaatactataatgagaaattgatagatatttttcaaaaatacagtgatgtcattgcaggacaattttatggacacactcacagagacagcattatggttctttcagataaaaaaggaagtccagtaaattctttgtttgtggctcctgctgttacaccagtgaagagtgttttagaaaaacagaccaacaatcctggtatcagactgtttcagtatgatcctcgtgattataaattattggatatgttgcagtattacttgaatctgacagaggcgaatctaaagggagagtccatctggaagctggagtatatcctgacccagacctacaacattgaagatttgcagccggaaagtttatatggattagctaaacaatttacaatcctagacagtaagcagtttataaaatactacaattacttctttgtgagttatgacagcagtgtaacatgtgataagacatgtaaggcctttcagatttgtgcaattatgaatcttgataatatttcctatgcagattgcctcaaacagctttatataaagcacaattactagtatttcacagtttttgctaatagaaaatgctgattctgattctgagatcaatttgtgggaattttacataaatctttgttaattactgagtgggcaagtagacttcctgtctttgctttcttttttttttctttttgatgccttaatgtagatatctttatcattctgaattgtattatatatttaaagtgctcattaatagaatgatggatgtaaattggatgtaaatattcagtttatataattatatctaatttgtacccttgttgaaattgtcatttatacaataaagcgaattctttatctctaaaaaaaaaaaaaaaaaaa

SEQ ID NO: 2585 - DNA, 1524 bp, Homo sapiens
ggcacgaggcgggacagcccgaacctccaggtcagccccgcggccctccatggcgctggtgcggcactcgtctgctgcctgctgactgcctggcactgccgctccggcctcgggctgcccgtggcgcccgcaggcggcaggaatcctcctccggcgatagggatagcccacctcatgttcctgtacctgaactctcaacagacactgttataaatgtgatcactaatatgacaaccaccatccagagtctctttccaaatctccaggttttccctgcgctgggtaatcatgactattggccacaggatcaactgcctgtagtcaccagtaaagtgtacaatgcagtagcaaacctctggaaaccatggctagatgaagaagctattagtactttaaggaaaggtggtttttattcacagaaagttacaactaatccaaaccttaggatcatcagtctaaacacaaacttgtactacggcccaaatataatgacactgaacaagactgacccagccaaccagtttgaatggctagaaagtacattgaacaactctcagcagaataaggagaaggtgtatatcatagcacatgttccagtggggtatctgccatcttcacagaacatcacagcaatgagagaatactataatgagaaattgatagatatttttcaaaaatacagtgatgtcattgcaggacaattttatggacacactcacagagacagcattatggttctttcagataaaaaaggaagtccagtaaattctttgtttgtggctcctgctgttacaccagtgaagagtgttttagaaaaacagaccaacaatcctggtatcagactgtttcagtatgatcctcgtgattataaattattggatatgttgcagtattacttgaatctgacagaggcgaatctaaagggagagtccatctggaagctggagtatatcctgacccagacctacgacattgaagatttgcagccggaaagtttatatggattagctaaacaatttacaatcctagacagtaagcagtttataaaatactacaattacttttttgtgagttatgacagcagtgtaacatgtgataagacatgtaaggcctttcagatttgtgcaattatgaatcttgataatatttcctatgcagattgcctcaaacagctttatataaagcacaattactagtatttcacagtttttgctaatagaaaatgctgattctgattctgagatcaatttgtgggaattttacataaatctttgttaattactgagtgggcaagtagacttcctgtctttgctttctttttttttttctttttgatgccttaatgtagatatctttatcattctgaattgtattatatatttaaagtgctcattaatagaatgatggatgtaaattggatgtaaatattcagtttatataattatatctaatttgtacccttgttgaaattgtcatttatacaataaagcgaattctttatctctaaaaaaaaaaaaaaaaaaa

SEQ ID NO: 2586 - DNA, 2006 bp, Homo sapiens
  misc_feature (15)..(15): n equals a,t,g, or c
  misc_feature (1833)..(1833): n equals a,t,g, or c
  misc_feature (1922)..(1922): n equals a,t,g, or c
cctaaagggaacatnagctggagctccaccgcggtggcggccgctctagaactagtggatcccccgggctggatattgtggcccgtgtactggcgataatggggatggtcagtgtcggctttttgctgttcattctctttacctctaacccgttctctcgcacgttgccgaacttcccgattgaaggtcgcgatcttaacccgctattgcaggatccggggctgatcttccatccgcctctgctttatatggggtacgtgggtttctcggtggcgtttgcttttgccattgcttctttgctgagcgggcgtctggacagcacttatgcgcgttttactcgtccgtggacgctggcagcgtggatcttcctgacgctcggcatcgtgctcggttccgcatgggcctattacgaactcggctggggtggctggtggttctgggatccggtagaaaacgcctcgtttatgccgtggctggtggggactgcgctgatgcactcactggcggtcactgaacaacgcgccagcttcaaagcgtggacattactgctggcaatcagtgccttctcgttgtgtctgttggggactttcctcgtgcgttccggcgtgctggtatcggtacacgcgtttgcgtctgatccggcgcgcggtatgtttatcctcgcctttatggtgctggtgattggcggttcgctgctgctgtttgccgcgcgtggacacaaagttcgctcacgcgtaaacaatgcgctgtggtcgcgggaatctttgctgttagcgaacaatgttttgctggtcgctgcgatgctggtggtgttgctggggacgctgctgccgttggtgcataagcaactgggactgggcagtatttcgattggcgaaccgttcttcaacaccatgtttacctggctgatggtgccgtttgcgctactgcttggtgtcggtcctctggtgcgctgggggcgggatcgcccgcgtaagatccgcaatttattgattatcgccttcatctctacgctggtgctgtcgctgctgttgccgtggctgttcgaaagcaaagttgtggcgatgacggtgctcggcctggcaatggcctgctggattgcggtgctggcaattgcggaagctgcgctacgtatttcacgcggcacgaaaaccaccttcagttattgggggatggtggcggctcaccttgggctggcagtgacaattgttggcattgcctttagccagaactatagcgttgagcgtgatgtgcgcatgaagtccggcgatagcgtcgatattcatgaatatcgcttcaccttccgtgatgtcaaagaggtgactggcccgaactggcgtggcggtgtggcgactatcggcgtaacgcgcgatggcaagccggaaacggtgctgtatgcggaaaaacgttattacaacactgccgggtcgatgatgaccgaagcggcaattgacggcggcatcacgcgtgacctgtacgcggccctcggtgaagagctggaaaacggcgcgtgggccgtgcgtctttactacaaaccatttgttcgctggatttgggcgggcgggctgatgatggcgttgggggggcccggtacccaattcgccctatagtgagtcgtattacaattcactggccgtcgttttacaacgtcgtgactgggaaaaccctggcgttacccaacttaatcgccttgcagcacatccccctttcgccagctggcgtaatagcgaagaggcccgcaccgatcgcccttcccaacagttgcgcagcctgaatggcgaatggcaaattgtaagcgttaatattttgttaaaattcgcgttaaatttttgntaaatcagctcattttttaaccaataggccgaaatcggcaaaatcccttataaatcaaaagaatagaccgagatagggttgagtgttgntccagtttggaacaagagtccactattaaagaacgtggactccaacgtcaaagggcgaaaaaccgtctatcagggcgatggccc

SEQ ID NO: 2587 - DNA, 576 bp, Homo sapiens
  misc_feature (520)..(520): n equals a,t,g, or c
  misc_feature (569)..(569): n equals a,t,g, or c
ggaatctctctaaaattgacctcattggttttgttctcagcaaactgatctgggccattcaacatagtttttattgtgcctggtgttgatgcctgttctctttttacaatacattcatgaccattggatgatatcaatttgacatacatggcrtcmgggacttcatagccaccataggttttctcctctccatccattttgttcttatgaaatcctcctttgcttcccaaggaacttgagaagtttttcattagccccacagccaccatagccgggtccccatgtactgccatagccccattccagggctgccccctgacccggctgcctgcccccatgggttccagggcagtcccttcctttttaatgctgaatgatattctattgtatgaatacatcatattttgtttatccattcatcagttgatggacattgagttattttcacttttggctattatgaatawtgscagactgctttccaaagtggctgcactattttctattcttccagcactgnatgagcatcaaatttcttcacaatcctcaacacttggtaataataattnaatttta

SEQ ID NO: 2588 - DNA, 1343 bp, Homo sapiens
  misc_feature (1336)..(1337): n equals a,t,g, or c
  misc_feature (1342)..(1343): n equals a,t,g, or c
ggcagaggtatctgtgagaatgggtgctgcctcaacacccgtgggagctacacctgtaagtgtaatgatgggtttaccgccagccccaaccaggacgagtgccttgacaatcgggaagggtactgcttcacagaggtgctacaaaacatgtgtcagatcggctccagcaacaggaaccccgtcaccaaatcggaatgctgctgtgacggagggagaggctggggtccccactgtgagatctgccctttccaggggactgtggctttcaagaaactctgtccccatggccgaggattcatgaccaatggagcagatatcgatgaatgcaaggttattcacgatgtttgccgaaatggggaatgtgtcaatgacagaggatcatatcattgcatttgtaaaactgggtacactccagatataactgggacttcctgtgtagatctgaacgagtgcaaccaggctcccaaaccctgcaattttatctgcaaaaacacagaagggagttaccagtgttcatgcccgaaaggctacattctgcaagaggatggaaggagctgcaaagatcttgatgagtgtgcaaccaagcaacacaactgccagttcctatgtgttaacaccattggcggcttcacatgcaaatgtcctcccggatttacccaacaccatacgtcctgcattgataacaatgaatgcacctctgacatcaatctgtgcgggtctaagggcatttgccagaacactcctggaagcttcacctgtgaatgccagcggggattctcacttgatcagaccggctccagctgtgaagacgtggacgagtgtgagggtaaccaccgctgccagcatggctgccagaacatcattgggggctacaggtgcagctgcccccagggctacctccagcactaccagtggaaccagtgtgttgatgaaaacgaatgcctcagcgctcacatctgcggaggagcctcctgtcacaacaccctggggagctacaagtgcatgtgtcccgccggcttccagtatgaacagttcagtggaggatgccaagacatcaatgaatgtggctctgcgcaggccccctgcagctatggctgttccaataccgagggcggttacctgtgtggctgtccacctggttacttccgcataggccaagggcactgtgtttctggaatgggcatgggccgaggaaacccagagccacctgtcagtggtgaaatggatgacaattcactctccccagaggcttgttacgagtgtaagatcaatggctaccccaaacggggcaggaaacggagaagcacaagcgaaacwgatgcctccaaggcgagcnntcatnn

SEQ ID NO: 2589 - DNA, 1011 bp, Homo sapiens
  misc_feature (2)..(2): n equals a,t,g, or c
  misc_feature (15)..(16): n equals a,t,g, or c
  misc_feature (82)..(82): n equals a,t,g, or c
  misc_feature (1010)..(1010): n equals a,t,g, or c
cnttccctcactaanncttaacaaaagctccagctccaccgcggtggcggccgctctagaactagtggatcccccgggctgnataacctcggcgtgggtatcggttatgccttgattgcatatcaatccaccctgaaaggcgtgagcaaacttcctgacgctatttgccgtctgggcggccattaatgcgttcaacatggttgatggcattgatggcttgctgggcgggttgtcctgcgtctcgtttgcagcaatcggtatgattttgtggttcgacgggcaaaccagcctcgcaatctggtgctttgcgatgatcgccgccatcctgccatacatcatgcttaaccttggtatcctgggtcgccgctacaaagtctttatgggtgatgcgggcagtacgctgattggttttaccgttatctggatcctgctcgaaacgacccagggcaaaacccatcccatcagcccggttaccgctttgtggataatcgccattccgctaatggatatggtggcgattatgtaccgtcgcctgcgtaaaggcatgagcccattctctcctgaccgtcagcatattcaccatttgatcatgcgtgccgggtttacttcccgtcaggcgtttgtgctgattacccttgccgcagcactgctcgcttccatyggcgtgctggcagaatattctcattttgtcccggagtgggtcatgctggtgctctttttgctagcattcttcctctatggatattgcattaagcgtgcctggaaagttgctcgctttattaagcgcgtaaaacgcagactgcgtagaaatcgtggtggcagccccaatttaaccaaataaatgaggatgtgatgacacaaccaatgcctgggaaaccggccgaagacgctgaaaatgaactggatattcgtgggttgtttcgtaccttgtgggctgggaagctatggattattggcatggggctggcgtttgcgttaatcgcgctggcgtatacgttttttgctcgtcna

SEQ ID NO: 2590 - DNA, 2182 bp, Homo sapiens
  misc_feature (468)..(468): n equals a,t,g, or c
taacgatgcctggcctggatgtttattttgccgctgatgtttgttacgccgagaaagttgcgcaagaaaaaggttttttatatcgtttaacatcacgatatcgccattatgccgcatttgagcgagcgactttcgagcagggtaaatcgacgaaacttatgatgctgaccgataagcaaatcgccgatttccagaagcattatcaaactgaacctgaacgttttcaaattcttcctcccggtatttatccggacagaaaatacagtgagcaaatcccaaacagccgtgaaatttatcgccagaaaaatggcataaaagagcaacaaaacttattactgcaggttggatcagattttggccgtaaaggtgtagatcgctcaattgaagctttggcatcgttaccggaatcattacgtcacaatacgcttttatttgttgttggtcaggataagccgcgaaaatttgaancgctggcagaaaaactcggcgtgcggagcaatgtgcatttcttctccggtcgcaatgatgtgtcagaattaatggcagccgctgatttattactgcatcccgcttatcasgaagccgcgggtatcgttcttctagaagcgatcactgctgggttacctgttttaacaacagcggtatgtgggtacgcgcattatattgcggatgccaattgtggaacggtcatcgctgaacctttctctyaggaacaattaaatgaagttttacgtaaagcgttaactcagtcgccattgcgaatggcctgggcggagaatgctcgccattatgccgatactcaggatttgtatagcttgccagaaaaagccgcggatatcattacaggtggtttagatggttgaattaaaagagccgsttgccacactttggcgtggtaaagatgcttttgcagaggtcaaaaaactgaacggcgaggtctttcgtgaactggagactcggcggacattacgctttgaactgccgggaaaagctattttcttaaatgcmcaaggggacgacattaaaagagattataaaaaatctactctcattgcggatgcccgktttgggcgcagacagagagtggcacgctattcatcgcctgagtgatgttggcgttgatacaatgaagggcattgggtttggcgaaaaagggttaaatccattaactcgcgcatcatttattattaccgaagatctcactcccacaattagccttgaagattattgtgccgattgggcagtcaacccscctgatatacgtgttaagcgtatgctgatcgcacgtgtagcaaytatggtgcgtaaaatgcatactgcagggataaatcaccgcgactgtwacatttgccactttttgcttcatttgccatttactgsccgggaagatgaattaaaaatttcagttatcgatctgcatcgggcacagatacgtgcaaaagtaccgcgccgctggcgcgataaagacctgattggtttatatttctcatcaatgaatattggcctgacgcaaagagatatctggcgatttatgaaggtttattttgggatgcctttacgcaaaatattgtctcttgaacagaatttattgaacatggcaagcgttaaggccgagcgtattaaagagcgaacacaacgcaaaggattataaaaatatttattagtatgtactggaactaactttattatgactatttattttataaattgggttgcagattatgaattaaaaatgattcagtacctgaaaaaaaagtacaagataaaaaatataacaacaccaaaaaaatataactggattaataaaaaaatatcaaaaatagggatggataatgcatggctggggcgattattcatcaagcattacctcaatgatattaaaaaagatgacataattatcattaatgacagtgttgttaataaaggtatcaataaacaaatattaaaaaatattaactgtcataaagttttgcttctaagaaatactgttggcgaagattttattcttgataacgcgaattatttcgatattatatatgattttgagcatagatttatagggaatgaaaagatcaaggcaatagaacaattttttcctataggaatggatgaaattagaaattatagtttatctgacaaaaataacagccagccaatatgttttttccttggtcgtgataaa

SEQ ID NO: 2591 - DNA, 975 bp, Homo sapiens
gatgatcggagacatcctgctgttcgggacgttgctgatgaatgccggggcggtgctgaactttaagctgaaaaagaaggacacgcaggctttggggaggagtccagggagcccagcacaggctgttcggctcttgaatcccagcgatgaaaccaggaactcactttcccgggatgccgagtctccattcctccattcctgatgacttcaagaatgtttttgaccagaaaaccgacaaccttcccagaaagtccaagctcgtggtgggtggaaaagtgttcgccgagggtctgcttggccactcagtgcagctgcgattaaccctaaaggctttaaggaacgggccacctgtaacagagacaccagccttcctgtatagacactaaattgttagcaagagtgttgagctagttcctggtgaagtgtttccacagaagacatgtggagcagttgtggggatattaagggaaactttcctctgccttgacccctttgttaaataaaatgactttgggagccattcattgtacagttgcaggaatgagagtgattttatgatgtggtacattgggaccatgttctaaaaccttgggtttctgagtctgctttttgagtaggtgatttkgaggttgaaaaaccaggggccttcatctaggaaatacagcattttccagaagcttctttgaaagggaatcctggttttgttgccaaaatgaaacgcccggggttggcgctgaatcccacaactgtgtgatttgcttgttgagtttttttgttgtctggtttttttgtttgtttgtttataccaataagaatgagcctgaatgttggtggtttttgaaatcctgacttggaggtaaacctggaggaaggaaaaaaagtaaatatgcaggcttttaggactgagtagccttgaaaataaacctcatttctaaaaaggaaaaaaaaaaaaaaaaaaaaaaaaaaaaagggggg

SEQ ID NO: 2592 - DNA, 2529 bp, Homo sapiens; identical to SEQ ID NO: 589

SEQ ID NO: 2593 - DNA, 402 bp, Homo sapiens
  misc_feature (4)..(4): n equals a,t,g, or c
aagnccctctttatccttggtattcagattctggcctgtgccttggcagcctccatccttcgcaggcatctcatggtctggaaagtgtttgcccctaagttcatatttgaggctgtgggcttcattgtgagcagcgtgggacttctcctgggcatagctttggtgatgagagtggatggtgctgtgagctcctggttcaggcagctatttctggcccagcagaggtagcctagtctgtgattactggcacttggctacagagagtgctggagaacagtgtagcctggcctgtacaggyrctggatgatctgcaagacaggctcagccatactcttactatcatgcagccaggggccgctgacatctaggacttcattattctataattcaggaccacagtgg

SEQ ID NO: 2594 - DNA, 1803 bp, Homo sapiens
gctgagactacaggatgcagaaagcctcagtgttgctcttcctggcctgggtctgcttcctcttctacgctggcattgccctcttcaccagtggcttcctgctcacccgtttggagctcaccaaccatagcagctgccaagagcccccaggccctgggtccctgccatgggggagccaagggaaacctggggcctgctggatggcttcccgattttcgcgggttgtgttggtgctgatagatgctctgcgatttgacttcgcccagccccagcattcacacgtgcctagagagcctcctgtctccctacccttcctgggcaaactaagctccttgcagaggatcctggagattcagccccaccatgcccggctctaccgatctcaggttgaccctcctaccaccaccatgcagcgcctcaaggccctcaccactggctcactgcctacctttattgatgctggtagtaacttcgccagccacgccatagtggaagacaatctcattaagcagctcaccagtgcaggaaggcgtgtagtcttcatgggagatgatacctggaaagaccttttccctggtgctttctccaaagctttcttcttcccatccttcaatgtcagagacctagacacagtggacaatggcatcctggaacacctctaccccaccatggacagtggtgaatgggacgtgctgattgctcacttcctgggtgtggaccactgtggccacaagcatggccctcaccaccctgaaatggccaagaaacttagccagatggaccaggtgatccagggacttgtggagcgtctggagaatgacacactgctggtagtggctggggaccatgggatgaccacaaatggagaccatggaggggacagtgagctggaggtctcagctgctctctttctgtatagccccacagcagtcttccccagcaccccaccagaggagccagaggtgattcctcaagttagccttgtgcccacgctggccctgctgctgggcctgcccatcccatttgggaatatcggggaagtgatggctgagctattctcagggggtgaggactcccagccccactcctctgctttagcccaagcctcagctctccatctcaatgctcagcaggtgtcccgatttcttcatacctactcagctgctactcaggaccttcaagctaaggagcttcatcagctgcagaacctcttctccaaggcctctgctgactaccagtggcttctccagagccccaagggggctgaggcgacactgccgactgtgattgctgagctgcagcagttcctgcggggagctcgggccatgtgcatcgagtcttgggctcgtttctctctgagcttccttctcctacatctgcttgctgctgggatacccgtcaccacccctggtccttttactgtgccatggcaggcagtctcggcttgggccctcatggccacacagaccttctactccacaggccaccagcctgtctttccagccatccattggcatgcagccttcgtgggattcccagagggtcatggctcctgtacttggctgcctgctttgctagtgggagccaacacctttgcctcccacctcctctttgcagtaggttgcccactgctcctgctctggcctttcctgtgtgagagtcaagggctgcggaagagacagcagcccccagggaatgaagctgatgccagagtcagacccgaggaggaagaggagccactgatggagatgcggctccgggatgcgcctcagcacttctatgcagcactgctgcagctgggcc

SEQ ID NO: 2595 - DNA, 2529 bp, Homo sapiens; identical to SEQ ID NO: 589

SEQ ID NO: 2596 - DNA, 2086 bp, Homo sapiens
  misc_feature (10)..(10): n equals a,t,g, or c
  misc_feature (2070)..(2070): n equals a,t,g, or c
  misc_feature (2075)..(2075): n equals a,t,g, or c
  misc_feature (2079)..(2079): n equals a,t,g, or c
  misc_feature (2083)..(2083): n equals a,t,g, or c
tggaacgccngcaggtaccggtccggaattcccgggtcgacccacgcgtccggggggaataaaggacccgcgaggaagggcccgcggatggcgcgtccctgagggtcgtggcgagttcgcggagcgtgggaaggagcggaccctgctctccccgggctgcgggccatggccacggcggagcggagagccctcggcatcggcttccagtggctctctttggccactctggtgctcatctgcgccgggcaagggggacgcagggaggatgggggtccagcctgctacggcggatttgacctgtacttcattttggacaaatcaggaagtgtgctgcaccactggaatgaaatctattactttgtggaacagttggctcacaaattcatcagcccacagttgagaatgtcctttattgttttctccacccgaggaacaaccttaatgaaactgacagaagacagagaacaaatccgtcaaggcctagaagaactccagaaagttctgccaggaggagacacttacatgcatgaaggatttgaaagggccagtgagcagatttattatgaaaacagacaagggtacaggacagccagcgtcatcattgctttgactgatggagaactccatgaagatctctttttctattcagagagggaggctaataggtctcgagatcttggtgcaattgkttactgtgttggtgtgaaagatttcaatgagacacagctggcccggattgcggacagtaaggatcatgtgtttcccgtgaatgacggctttcaggctctgcaaggcatcatccactcaattttgaagaagtcctgcatcgaaattctagcagctgaaccatccaccatatgtgcaggagagtcatttcaagttgtcgtgagaggaaacggcttccgacatgcccgcaacgtggacagggtcctctgcagcttcaagatcaatgactcggtcacactcaatgagaagcccttttctgtggaagatacttatttactgtgtccagcgcctatcttaaaagaagttggcatgaaagctgcactccaggtcagcatgaacgatggcctctcttttatctccagttctgtcatcatcaccaccacacactgttctgacsgttccatcctggccatcgccctgctgatcctgktcctgctcctagccctggctctcctctggtggttctggcccctctgctgcactgtgattatcaaggaggtccctccaccccctgccgaggagagtgaggtaagtgaccacwgcaggatggcagtgggtgggcagggtggcagagtagggtggagagctggctgggcagctggacacttagccccctgcagagcagagctaagtcaagctcaaaggatttaatgtacctgcctgtgaagcagaagggaggaaactgtctggcctttcctaaccagggatgaacaagaaactgaactaaactgccagaaaagacaatgagttttggaggtktttctccctgcagagataaaatgtgagatggaaataaatgtttttatcagtacagttatttggagctttgagatactgacttttcctctcaaacaaaccctaagattctcttctcctgcagagacttaatgctttatgtgtgtagatcaggcacagtttgctacattctccaatcattggttctaggaataacctgatgcccaattcttcatttttctttcatttaaaaacaatattacctaaagatgggccaggcagtaatgaaaatacgctggagagggatatgttaatatcctggccttcctctcaaattctcgtcatctaaagaaaaaaattcttggactctaccactgaatcggccagtaaactgttctgatgcaagggtggcctggagtagaatacagtggaggcattaaaggctaatcatgagaaaggcaagagtgcctagcaagtggctttgctaatctgatcactcttagtacagctggagtctctagaagtaacatccacccattcagaagccagggttacatatctaaacactcaatgagaccaaaagatagakkgataaggaccaaattcggnggcgngccnccgnccc

SEQ ID NO: 2597 - DNA, 822 bp, Homo sapiens
  misc_feature (67)..(67): n equals a,t,g, or c
  misc_feature (98)..(98): n equals a,t,g, or c
  misc_feature (793)..(793): n equals a,t,g, or c
  misc_feature (820)..(820): n equals a,t,g, or c
attcaaagkgaamcattttactraagggaattcggtcaattcatccttgattcytgtataggtggtncagttttgtaaaggatcatcaagtattttgnaagactcattggctctgccagtggcttagataaataaatttgggcaagttattgatctctctcctcagagaaaaaaattgatgtgttttcttttatataaagagaaaaagaaaaagaaaaaatgtgatctgtaactcattatgtttccttgctagaaagctcaaagatatgttatttgcctgtttttagttgctatccagttttcttacaataatctctctgcctcagtctcctcatcggattacttgtcacatgtgttaaatccttcttttaattgatggttctgttgtatatatcttttatatttatataggtagcctcaactctcctttttttggagagtggtaatagaaatataaataataaatagttgccctttggtttccccaacctgtggtgacaacaagataataaaacagatacttatcctatataaaacaggcaaaaaggctttgggacaatatgggaatcatgatgtgggtttggtggaaagcgagcaaagcaccttgtaaggatcttgtagtctgaagattaaggtgtgcttggggtaggtcatgtcctcccagctctgtgggatttgtagcacatcatcccacgtggggaggagagtgggcatgggcatgagactatttawtagcttttactgtgtcagttgttgggttatgtattttgcatttgatattggattggaatcnttaaaataaccagagaagttgggcgtnag

SEQ ID NO: 2598 - DNA, 865 bp, Homo sapiens
gcgagcaccggagtcccgagccgtggctgccacgggcggtgggcgggcggaggagagcaccggaccaccagtgcaggctgccgagtcggggcggccgcccacggggaagctgcgaggcgcgggagcacctgggggaccgcttgcagcggggacgcgaggacccgggctgggctttcctcacccgggtaccttgttatcccataactttggtatcctgaaatctgaggattccaccaagataatatgataagaactttcagtgatttggggccatatcctacttagactaatgtggaatttccagatttcctgagagcttggtacagcagcacacactgcttgctaatcagcacaggcaataatgccatctctgcctcaagaaggagttattcagggaccctctcccctggatttgaatacagaattaccttatcaaagcacaatgaaaaggaaagtcagaaagaagaaaaagaagggaaccattacagcaaatgttgccgggacaaagtttgaaattgttcgtttagtaatagatgaaatgggatttatgaaaactccagatgaggatgaamcaagtawtcttatatggtgtgattctgctgttcagcrgagaaaatttcagagctgcaaaattatcaggtaggaaattaatcatgaccagttagtggtatgaggaaagttatatggattccacataactttttwagataggttcttaatatgttgccttattacatttcagctcttactcacctgaatagcctgttttgttgctatccagttgtattggctctttgcatgaagcctgcatcttttgcagacttaagttttaacctctttctatctttagggaagaatcaatagg

SEQ ID NO: 2599 - DNA, 1144 bp, Homo sapiens
  misc_feature (988)..(988): n equals a,t,g, or c
  misc_feature (1098)..(1098): n equals a,t,g, or c
  misc_feature (1116)..(1116): n equals a,t,g, or c
  misc_feature (1120)..(1121): n equals a,t,g, or c
gtggaagccaaaaattacctgaagtcttctgcttatctttattccacacttgaaattcagtggaagaaaaatgccaatatgttaattgtaaaatctagattggagaggaacacatgaatagtttgtactaaaaaggaaacgttcctctgagcataaacgttttcagtaggattagagggttgggagcagtggagaaccaaaaccaaatctctcctgtgaatattgcttcattatttcacgtcctaagtaaacatagatgagttgactttaagtactaaaaataatttgaactagggaggtggaaagtatggcataggtgtgatgatcaggggatatttttacttttggtcttttgtacctaaccgaaggtcataaaaaaagctataaaaagtacattttcctgagtagacgtattgtctcagctgtgtgtgttttccttgtgccataaataatcactaaaccctttggcagttttgtgtacctgttaaacctgagaagatcgaaaggaaggatttttgggtgcaaccgaaaaacagttctcagttactactgagaataatttggccctagataaaactgttgtaactaaaaataaggttaggctgtaactaatatttttcaaatgaaatactatgaactaaagtttagatagaaaaatgtttctgcaatgaatatatttcagaagtattttaattttggtttaacttaactgtttacttgcagttcgtttagtaatagatgaaatgggatttatgaaaactccagatgaggatgaaacaagtaatcttatatggtgtgattctgctgttcagcaggagaaaatttcagagctgcaaaattatcaggtaggaaattaatcatgaccagttagtggtatgaggaaagttatatggattccacataacttttttagataggttcttaatatgttgccttattacatttcagctcttactcacctgaatagcctgttttggtgctatccagntggattggctctttgcatgaagcctgcatcttttgcagacttaagttttaacctctttctatctttagggaagaatcaatagaaaaaacctcttctgggtgggccgtggnggcttgacacctgtaatnccannatttttgggaaggccaaggcggg

SEQ ID NO: 2600 - DNA, 1409 bp, Homo sapiens; identical to SEQ ID NO: 983

SEQ ID NO: 2601 - DNA, 547 bp, Homo sapiens
tcgacccacgcgtccgctcactcctcatcccaaagaatgaaatttaccactctcctcttcttggcagctgtagcaggggccctggtctatgctgaagatgcctcctctgactcgacgggtgctgatcctgcccaggaagctgggacctctaagcctaatgaagagatctcaggtccagcagaaccagcttcacccccagagacaaccacaacagcccaggagacttcggcggcagcagttcaggggacagccaaggtcacctcaagcaggcaggaactaaaccccctgaaatccatagtggagaaaagtatcttactaacagaacaagcccttgcaaaagcaggaaaaggaatgcacggaggcgtgccaggtggaaaacaattcatcgaaaatggaagtgaatttgcacaaaaattactgaagaaattcagtctattaaaaccatgggcatgagaagctgaaaagaatgggatcattggacttaaagccttaaatacccttgtagcccagagctattaaaacgaaagcatccaaaaaaaaaaaaaaa

SEQ ID NO: 2602 - DNA, 609 bp, Homo sapiens
  misc_feature (4)..(5): n equals a,t,g, or c
  misc_feature (29)..(29): n equals a,t,g, or c
cccnnggaacccccctagggaaagttggnacgcctgcaggtaccggtccggaattcccgggtcgacccacgcgtccgctcactcctcatcccaaagaatgaaatttaccactctcctcttcttggcagctgtagcaggggccctggtctatgctgaagatgcctcctctgactcgacgggtgctgatcctgcccaggaagctgggacctctaagcctaatgaagagatctcaggtccagcagaaccagcttcacccccagagacaaccacaacagcccaggagacttcggcggcagcagttcaggggacagccaaggtcacctcaagcaggcaggaactaaaccccctgaaatccatagtggagaaaagtatcttactaacagaacaagcccttgcaaaagcaggaaaaggaatgcacggaggcgtgccaggtggaaaacaattcatcgaaaatggaagtgaatttgcacaaaaattactgaagaaattcagtctattaaaaccatgggcatgagaagctgaaaagaatgggatcattggacttaaagccttaaatacccttgtagcccagagctattaaaacgaaagcatccaaaaaaaaaaaaaaag

SEQ ID NO: 2603 - DNA, 919 bp, Homo sapiens
  misc_feature (46)..(46): n equals a,t,g, or c
  misc_feature (51)..(52): n equals a,t,g, or c
  misc_feature (66)..(66): n equals a,t,g, or c
actggtgccccatggcctttctgggggtgctcacgtccccaggggnggggnntttcccgccccagngggggggggcccgacacctggagatggcagaaatactgggagccgacacccgcactgccaggatccaagatgcagggctggtgttggcagacacgctccggaaattcttattcgatctggatgttgatgatggcctagcagctgttggttactccaaagctgatatccccgcactagtgaaaggaacgctgccccaggaaagggtcaccaagcttgcaccccgtccccagtcagaagaggatctggctgctctgtttgaagcttcaatgaaactgtattaattgtcattttaactgaaagaattaccgctggccattgtagtgctgagagcaagagctgatctagctagggctttgtcttttcatctttgtgcataacttacctgttaccagtataggtgggatatacatttatcttgcaggaaattccccaaagctcagagtccagttccttccataaaacaggctggacaaatgaccactatgttagacccccaggctcgacttcaggggtcagtgttcctgtcccaaaccccacacagaatactctgcctctgyttcatgtagcaaatgagcaaaaactcagtatctatcaaaagtgtaaattatatttcctatgcctagtaattcacttcatgtctaaaaatttatctgatagaaacactagcaccagtacatacagaagcatggcaaggatgtttctggcagcacttttctaataataaaagatttgaaacaaccttaagtattcattattggtatatagatcacttatagtatactagacagtggaatactatggtactgttaataaagatgaagtaaatctcwwrraaaaaaaaaaaaaaaaaaaa

SEQ ID NO: 2604 - DNA, 405 bp, Homo sapiens
  misc_feature (29)..(29): n equals a,t,g, or c
  misc_feature (38)..(38): n equals a,t,g, or c
atgctgcccggccataacgcccaacagtngtaaacatnagccaatgcggccatgtagggcaaccagtgcaccaatccctamctcttctgggtcctcggtaggcggggcgtgttcctgcataataaccaccgaatgtgcaccgtatttatttgccttaaggctttccatttcatcatccccacgtaattcctactccgcctagctgatccccggttgcaccaacccaacacctattttataacggcgtttaattttgttttttagatataagcattttccattcttcatttttcccctgcatcgtttttcctaacccgccgttacggccccctttatgcgcaccttttacacgggcttccccccattmcctacacccccccccccccccccccccccccccccgtg

SEQ ID NO: 2605 - DNA, 1043 bp, Homo sapiens
  misc_feature (1042)..(1043): n equals a,t,g, or c
gaattcggcacgaggacaagcccttgcgcctgcctctccaggatgtctacaaaattggtggtattggtactgttcctgttggccgagtggagactggtgttctcaaacccggtatggtggtcacctttgctccagtcaacgttacaacggaagtaaaatctgtcgaaatgcaccatgaagctttgagtgaagctcttcctggggacaatgtgggcttcaatgtcaagaatgtgtctgtcaaggatgttcgtcgtggcaacgttgctggtgacagcaaaaatgacccaccaatggaagcagctggcttcactgctcaggtgattatcctgaaccatccaggccaaataagcgccggctatgcccctgtattggattgccacacggctcacattgcatgcaagtttgctgagctgaaggaaaagattgatcgccgttctggtaaaaagctggaagatggccctaaattcttgaagtctggtgatgctgccattgttgatatggttcctggcaagcccatgtgtgttgagagcttctcagactatccacctttgggtcgctttgctgttcgtgatatgagacagacagttgcggtgggtgtcatcaaagcagtggacaagaaggctgctggagctggcaaggtcaccaagtctgcccagaaagctcagaaggctaaatgaatattatccctaatacctgccaccccactcttaatcagtggtggaagaacggtctcagaactgtttgtttcaattggccatttaagtttagtagtaaaagactggttaatgataacaatgcatcgtaaaaccttcagaaggaaaggagaatgttttgtggaccactttggttttcttttttgcgtgtggcagttttaagttattagtttttaaaatcagtactttttaatggaaacaacttgaccaaaaatttgtcacagaattttgagacccattaaaaaagttaaatgagaaaaaaaaaaaaaaaaaaaaaaaaaaaaaaaaaaaaaaaaaaaaaaaaaaaaaaaaaaaaaaaaaaaaaaaann

SEQ ID NO: 2606 - DNA, 926 bp, Homo sapiens
ctgttggccgagtggagactggtgttctcaaacccggtatggtggtcacctttgctccagtcaacgttacaacggaagtaaaatctgtcgaaatgcaccatgaagctttgagtgaagctcttcctggggacaatgtgggcttcaatgtcaagaatgtgtctgtcaaggatgttcgtcgtggcaacgttgctggtgacagcaaaaatgacccaccaatggaagcagctggcttcactgctcaggtgattatcctgaaccatccaggccaaataagcgccggctatgcccctgtattggattgccacacggctcacattgcatgcaagtttgctgagctgaaggaaaagattgatcgccgttctggtaaaaagctggaagatggccctaaattcttgaagtctggtgatgctgccattgttgatatggttcctggcaagcccatgtgtgttgagagcttctcagactatccacctttgggtcgctttgctgttcgtgatatgagacagacagttgcggtgggtgtcatcaaagcagtggacaaaaaggctgctggagctggcaaggtcaccaagtctgcccagaaagctcagaaggctaaatgaatattatccctaatacctgccaccccactcttaatcagtggtggaagaacggtctcagaactgtttgtttcaattggccatttaagtttagtagtaaaagactggttaatgataacaatgcatcgtaaaaccttcagaaggaaaggagaatgttttgtggaccactttggttttcttttttgcgtgtggcagttttaagttattagtttttaaaatcagtactttttaatggaaacaacttgaccaaaaatttgtcacagaattttgagacccattaaaaaagttaaatgagaaaaaaaaaaaaaaaaaaaaaaaaaaaaaaaa

SEQ ID NO: 2607 - DNA, 1018 bp, Homo sapiens; identical to SEQ ID NO: 1294

SEQ ID NO: 2608 - DNA, 549 bp, Homo sapiens
  misc_feature (407)..(407): n equals a,t,g, or c
  misc_feature (437)..(437): n equals a,t,g, or c
  misc_feature (471)..(471): n equals a,t,g, or c
  misc_feature (488)..(488): n equals a,t,g, or c
  misc_feature (497)..(497): n equals a,t,g, or c
ctgcaggaattcggcacgagcgactgtcagcactgctccacctctgattccaccaccgggtattccaataactgtaccacctccaggttttcctcctccaccaggcgctccacctccatctcttataccaacaatagaaagtggacattcctctggttatgatagtcgttctgcacgtgcatttccatatggcaatgttgcctttccccatcttcctggttctgctccttcgtggcctagtcttgtggacaccagcaagcagtgggactattatgccagaagagagaaagaccgagatagagagagagacagagacagagagcgagaccgcgatcgggacagagaaagagaacgcaccagagagagagagagggagccgtgatcacagtcctacaccaagtgttttnaacagcgatgaagaacgatacagatacagnggaatattgcatgaaagaggttatgagcgcacanagcaagtcgagaaaaanaagaaccgncatagagaaagaccgaccagggagaaagaggaaaccagacataagtcttctt

SEQ ID NO: 2609 - DNA, 874 bp, Homo sapiens
ggcacgagcgactgtcagcactgctccacctctgattccaccaccgggtattccaataactgtaccacctccaggttttcctcctccaccaggcgctccacctccatctcttataccaacaatagaaagtggacattcctctggttatgatagtcgttctgcacgtgcatttccatatggcaatgttgcctttccccatcttcctggttctgctccttcgtggcctagtcttgtggacaccagcaagcagtgggactattatgccagaagagagaaagaccgagatagagagagagacagagacagagagcgagaccgtgatcgggacagagaaagagaacgcaccagagagagagagagggagcgtgatcacagtcctacaccaagtgttttcaacagcgatgaagaacgatacagatacagggaatatgcagaaagaggttatgagcgtcacagagcaagtcgagaaaaagaagaacgacatagagaaagacgacacagggagaaagaggaaaccagacataagtcttctcgaagtaatagtagacgtcgccatgaaagtgaagaaggagatagtcacaggagacacaaacacaaaaaatctaaaagaagcaaagaaggaaaagaagcgggcagtgagcctgcccctgaacaggagagcaccgaagctacacctgcagaataggcatggttttggccttttgtgtatattagtaccagaagtagatactataaatcttgttatttttctggataatgtttaagaaatttaccttaaatcttgttctgtttgttagtatgaaaagttaactttttttccaaaataaaagagtgaatttttcatgttaagttaaaaaaaaaaaaaaaaaaaaaa

SEQ ID NO: 2610 - DNA, 1010 bp, Homo sapiens
  misc_feature (62)..(62): n equals a,t,g, or c
gatctgctactgaagtagacaacaattttagcaaaccacctccgtttttccctccaggagcncctcccactcaccttccacctcctccatttcttccacctcctccgactgtcagcactgctccacctctgattccaccaccgggtattccaataactgtaccacctccaggttttcctcctccaccaggcgctccacctccatctcttataccaacaatagaaagtggacattcctctggttatgatagtcgttctgcacgtgcatttccatatggcaatgttgcctttccccatcttcctggttctgctccttcgtggcctagtcttgtggacaccagcaagcagtgggactattatgccagaagagagaaagaccgagatagagagagagacagagacagagagcgagaccgtgatcgggacagagaaagagaacgcaccagagagagagagagggagcgtgatcacagtcctacaccaagtgttttcaacagcgatgaagaacgatacagatacagggaatatgcagaaagaggttatgagcgtcacagagcaagtcgagaaaaagaagaacgacatagagaaagacgacacagggagaaagaggaaaccagacataagtcttctcgaagtaatagtagacgtcgccatgaaagtgaagaaggagatagtcacaggagacacaaacacaaaaaatctaaaagaagcaaagaaggaaaagaagcgggcagtgagcctgcccctgaacaggagagcaccgaagctacacctgcagaataggcatggttttggccttttgtgtatattagtaccagaagtagatactataaatcttgttatttttctggataatgtttaagaaatttaccttaaatcttgttctgtttgttagtatgaaaagttaactttttttccaaaataaaagagtgaatttttcatgttaagttaaaaaaaaaaaaaaaaaaaaaaaaaaaaaaaaaaaaaaaaaaaaaaaaaaaaaaaaaaaaa

SEQ ID NO: 2611 - DNA, 843 bp, Homo sapiens
  misc_feature (15)..(15): n equals a,t,g, or c
  misc_feature (20)..(20): n equals a,t,g, or c
aaggggaacttttantggantgtccccagccagttttgaattctatttmcgtgacagtgatgcatgctgtcatttaattctcacaaaaactctcgttatatattttatcctcattttgtagatgaggatagcaggcttagaaggatttggtaatttactaatgtcatgatagggatttaaatctggaattgaagtaattgtgtctcactactctaagctaattgaacatcagacattaagagagatgatccttattgaagtaaaccagttcctaaaggatccttgtagtatacatacttgggaatcctgttcagagtaatttttaggaagtaggtacacagtagtaagtcttctgttgcctcagttggccatagatggaattctgtgtttgccactcattagaaatttaggaattttaggcagggcacggtggctcacacctgtaatcccagcactttgggaggccgaggcgggcagatcacctgaagtcaggagttcaagaccagcctgaccaacatggggaaaccccgtctctactaaaaatacaaaattagccgggcgtggtggtgcatacctgtaatcccagctactcgagaggccgaggcgggtgaatcacttgaggccagaagttcaagaccagcctggccaacatggcaaaactccgtctctactaaaaatacaaaaattagccaggtgtggtaacgcagacctgtaatcccagctactcgaatcaggagaatcacttgaacccaggaggcagaggttgcagtgagccgagatcgcactctagcctgggtgacagagtgagactctgtctaaaaaaaaaaaaaaaaaaactcgagg

SEQ ID NO: 2612 - DNA, 1891 bp, Homo sapiens
  misc_feature (1884)..(1884): n equals a,t,g, or c
ggtaatttgttcatcaattttgttctcttttgaaattcaatccaatctggaagtggcataggtaaataataatattcttccttttctcttcctgtagggtgctggagatcyagaagacccatggtagccttaaaaaccttctaaaatgcttttgattctgaaaattgggggaaaaaacttttaatcacaattttcttcaatacaaggggaaaatattcttgcggattcccaacgttttgtgatatgagcagaaaatcattagcatttcccatcatttgttcatatttgtgttttctgacagttgccacttgtagcattgcctgtactacagtattttttgccaacctcaggcatactcgttacatctgtattgaactttcggccctagaaaccagtggagttatttcaccacaaatcaacaatgtgcctgaggtgcatgggaaatatagttagctatactctgaaaatacattatgttttttttctttaaacaaaacacacaacatgtaagcatgtaagagtaaagaattgtatgatatgttccttttttcagttcaccaagttggaagccttttgcagctctgtggcttggaatttcatttgagcaatttctataggatatgtatttattattgattgttatttaatttttttccaattttacctgtattaccaaactgggttctccaataatgtccaaattgtaatgttgccttgcttcaagataaagtgtatttgggaataatattataaacccttacaaattttatgcatgtatctactgcatccttcaactctcactagaaaatcttttgaaaccaaatggattaatttatggctatttataatttgctttgacatctcactgttggaaattttttaaagatgagatttgcctttataatgtaaattgtgatttttgttttacatgtgggtttctatagttttaattttttcagcttttaagatacgagttttgtgtaatttggtatttttaatcatttatgttattttaaaagctcagaatatcacattgaaattactataaatacatttaaaattatctattttagatctaaggaaatactacagagatattttcatgggttcagtaacttttcattttataacattgggcacggtacagagtgattgtcacataaggtacttgaagatttattagtttaattctatttttacagtaaccttgaattcttctgagttttgcatgtattaaattcaattaatgctgaacatgaagagtaaagtatttatctgaaagaagtttctgggttaggagaagtaatgaatgtatccatttgtacatggtttacatgttgtggatgctttgtaaacattttcctgtatgtttaaattgtgtttcagcaggatgtaattgcccttgtgtgtagttaaaatgagtcatcatctggtcctttgtgaaatggaattcatggtattttctgtaacgttttcctgaagctgtttctggagagccacacatttaaatacagacagctttcctgatcatttgatttattgtgcacctgatttttggtctaaaaggaattattgccacaatatattttatttattctttagattttagccttgtaagttaaagtgctttacatgatgatgtgaaaagctgtttgtccctttactgggtttggggggttgttaaaagatagggaatgaagaatgcaaaatggtttatcgttcaaactgtccactctgatccaaccctgtactgatagtacttcccagtatgatattgtgatgtttcatacaatgcagtgaacataaccaacttgttacctaaataaagaattgataaaaacagtgtgacatattaaaaaaaaggggggcccggtacccaattcnccctata

SEQ ID NO: 2613 - DNA, 1316 bp, Homo sapiens
aattcggcagaggttttcttatattttaagtaaatttaaagtggctatcagaatatttattcttgtttgagactaccaacataactacgtgttgaaggtgcttcacagagaatatattgcctttaatgtgaaataattttcaccaatgttgctaactttaataaagtataaaatttgtagaatattcagttaagtagttggtaacccttttctattttagtaaaacttaatgcatgtttacttttttttgaaagatgcagacaatctctttgaacatgaattgggggctctcaatatggctgcattactacgaaaagaagaaagagcaagtcttcttagtaatcttggcccatgttgtaaggcgttgtgcttcagacgggattctgcaattcgaaagcagcttgttaaaaatgagaagggcaccataaaacaagcttacacgagtgctccaatggtagacaatgaattacttcgattgagtcttcggttatttaagcggaagactacttgccatgctccaggacatgaaaagactgaagataataaactttcacagtccagtatccaacaggaactgtgtgtgtcttaagaccgaagttcaatatggtatttttggtactgtcttccttcagcagtgcatattcttttgcaaagttctttggtttgacaagcattagtgacaaaggcagaaaagatttatcagccatgctaaaagagtgaagaattttgatctttagagacactagttttggccaacttaagattttacgttaatttttacatagtatttgacactcatgcaaaataatgtgaaaacatctagatttagtagtttattctgcgccttttgttaaaactgaagattttggaaaatggttgtcactgctcttccagcctatgaatatttttgtgaaatggaaccatggatttatgtctggatcatccatacagaaccaacaattttattcaaaaacaatgtgttcatcaaagtaattgctcacattgtgcagtactatgttgtacagaccacgtgaaagggaatgctggtctagctggcgtggtatgtttataggcgaatttcagcagaaggaagccaaaatagttttttccttttgaaagttttttaaaaattatttcatgggtcttttttttaattaatatgtgtgcattgttacaatgtatgttggatgtcttttgaccctaaatgctttttttgttatcagagattgtgtactatttttatttttaataaatgtatcttccctttcaaaaaaaaaaaaaaaaaaaaaaaaaaaaaaaaaaaaaaaaaaaaaaaa

SEQ ID NO: 2614 - DNA, 1720 bp, Homo sapiens
tttttttttttttttttttttttttttcaaattaaatacttttaattatcattctagccaggatcatactaagtaggatctcatgacagtcacatatgcagcgacttcacctaaaccgtggcactgaatgctctgccatgagccacaagcagcacagtgatcatcacccacaaggacaggttgctgggatgaggcaccctttcctttcatgtttaggttcttctcacctgcatttcactttcctaaaggtcccagccacacagcgttcttttagggattaaagtagtaggaaaaaaataaagagaacacaacatccatccttaaagaaaaaaagtaaatccactttatggtggacttcagctatggacaaatttgggatcagtgttctccagtctgaacatagtcttctgttacctgggagagagtggtcaggtactgccagctcagggcagccaaaagcatgacaaacgacaggtagatgggggagtagtggcttcgggaaatcagctgacagttgggaagattctgcgtccggatggtggagatgatctccttgttttggagaagatgggtctgagtcggggattctatgataaatctcttccatatactgatatatgatggctttgacagctggcatattggtggcatccatcatcagggtcactgcttgccctttccgaatcttcactccccctttgaacacctgctggttattataacaggcagccaaagtggcaatggccatcacctgtggaatagcacagaagttaaacacactctggtttctgagtctcgaaaggtaggtgatgacatctgggatgtggtgcagtgcattggtataagttcattcaggcactgcacggccaagtcaatattctccggcttagcaaaatcccctaactcttaacatacctgctccaaacctcttgaggccagaactctcttcctccttgctggtcttccagatagtcacggatgatgtttgttttctgcagaaacaggcccatagagttggcacgttctgtatcttcaccaactaaggggtcttcaaactctgaggctgagaaaagacgggaaaggccaattccgaccagcccagcaacatagtggcagtacttgtcccactcctgttcagaggtcacatgcttatccaaaaactctgccatcccaatgcccattctccggcaaatgtcggcaatcactgtttggtatttctcagccagatttctaaactcaagggagatcgttgggaagtcctccagcacctggcgatccttctccttgctctccatgaaccgccagtctggttggtaaaggaaagagtgaaagttgtgtaacagcgggaccttcttttccacactgatggtcatgtcatcttccagtgtgtccagagctcggagaaccagataaaatatgcaaactgcgttgcgcatttccccatccagcgcctggataacagctgcgaaactgcgactggtctgattgagatacttgtagcaagttttcaggctgctgctgagcgagtcctggtccatcttgggcatcaccttccgcttgcccccgatccggaagcgcaccaggttgtagaactcttcggggtggccaaggcatttcacgaactccatcctggcgcaggcggcggactcccgggcgcgactctcacctctgcggtccccaggcgctcaccggccggctggacctgtggagtaggtgcttc

SEQ ID NO: 2615 - DNA, 757 bp, Homo sapiens
agcaccaaataaccaaggaaaaggaagtsagttaaggacgtactcgtcttggtgagagcgtgagctgctgagatttgggagtctgcgctaggcccgcttggagttctgagccgatggaagagttcactcatgtttgcacccgcggtgatgcgtgcttttcgcaagaacaagactctcggctatggagtccccatgttgttgctgattgttggaggttcttttggtcttcgtgagttttctcaaatccgatatgatgctgtgaagagtaaaatggatcctgagcttgaaaaaaaactgaaagagaataaaatatctttagagtcggaatatgagaaaatcaaagactccaagtttgatgactggaagaatattcgaggacccaggccttgggaagatcctgacctcctccaaggaagaaatccagaaagccttaagactaagacaacttgactctgctgattcttttttccttttttttttttttaaataaaaatactattaactggacttcctaatatatacttctatcaagtggaaaggaaattccaggcccatggaaacttggatatgggtaatttgatgacaaataatcttcactaaaggtcatgtacaggtttttatacttcccagctattccatctgtggatgaaagtaacaatgttggccacgtatattttacacctcgaaataaaaaatgtgaatactgctccaaaaaaaggaattcgatatcaagcttatcgataccgtcgacctcgta

SEQ ID NO: 2616 - DNA, 665 bp, Homo sapiens
ttttttttttttttttttttttttgccgatgctactattttattgcaggaggtgggggtgtatgcaccgcacaccggggctatgagaagcaagaaggaaggagggagggcagagccccttgctgagcaacaaaggccgcctgctgccttctctgtctgtctcctggtgcaggcacatggggagaccttccccaaggcaggggccaccagtccaggggtgggaatacagggggtgggaggtgtgcataagaggtgataggcacaggccagcccggtacagacccctaggcgtcctgacaggtggatttcgacaaggtcattgtgccctgccaaggcacagcgtagatctggaaagagcagaatgctttccttttcagatgtggctggtcatggaaggggcagttgtccaagttgggctgggtcttggtacacgtggttcggcccagctccacgtccaagaagtagttcaccccagctacgatctgcttgcgggcgcgcaccacctgcagcgcgcggctgtggtacatgtcgttgctggctttgttgtactcgccgacggcaaagtccagtgcacgccgcacaccctcctcctccacgctggcgtccatggggcctcccaccaggcgcggcggcttgccgggactggagccggtcgcggctcgtgcc

SEQ ID NO: 2617 - DNA, 665 bp, Homo sapiens
ggcacgagccgcgaccggctccagtcccggcaagccgccgcgcctggtgggaggccccatggacgccagcgtggaggaggagggtgtgcggcgtgcactggactttgccgtcggcgagtacaacaaagccagcaacgacatgtaccacagccgcgcgctgcaggtggtgcgcgcccgcaagcagatcgtagctggggtgaactacttcttggacgtggagctgggccgaaccacgtgtaccaagacccagcccaacttggacaactgtcccttccatgaccagccacatctgaaaaggaaagcattctgctctttccagatctacgctgtgccttggcagggcacaatgaccttgtcgaaatccacctgtcaggacgcctaggggtctgtaccgggctggcctgtgcctatcacctcttatgcacacctcccaccccctgtattcccacccctggactggtggcccctgccttggggaaggtctccccatgtgcctgcaccaggagacagacagagaaggcagcaggcggcctttgttgctcagcaaggggctctgccctccctccttccttcttgcttctcatagccccggtgtgcggtgcatacacccccacctcctgcaataaaatagtagcatcggcaaaaaaaaaaaaaaaaaaaaaaaa

SEQ ID NO: 2618 - DNA, 757 bp, Homo sapiens
  misc_feature (19)..(19): n equals a,t,g, or c
  misc_feature (608)..(608): n equals a,t,g, or c
  misc_feature (666)..(666): n equals a,t,g, or c
  misc_feature (725)..(725): n equals a,t,g, or c
  misc_feature (751)..(751): n equals a,t,g, or c
gtagttccagagcggccgncccgcggtgaacaagatcagcaccacagacgcgatcttcgtccagcgggatctgaagctggtccagggcttcatgccccacttcttcaggctgttccggagcacggtcaagcaagtggacttttcagaggtggagagagccagattcatcatcaatgactgggtgaagacacacacaaaaggtatgatcagcaacttgcttgggaaaggagccgtggaccagctgacacggctggtgctggtgaatgccctctacttcaacggccagtggaagactcccttccccgactccagcacccaccgccgcctcttccacaaatcagacggcagcactgtctctgtgcccatgatggctcagaccaacaagttcaactatactgagttcaccacgcccgatggccattactacgacatcctggaactgccctaccacggggacaccctyagcatgttcattstgccccttatgaaaaagaggtgcctctctytgccctyaccaacattctgagtgcccagctcatcagccactkggaaagggcaacatgaccaggggttgccccgcctcctggggttttgcccaagtttttccntgggggactttaagttcggaccttcagggaaggcccctaggaggaacctgggggattnaaccgacatgttttcaggacagtttttaaggttggattttcaaggagttttttttaagnaccaaggaggcttttttcaagttcgnaggggg

SEQ ID NO: 2619 - DNA, 1216 bp, Homo sapiens
gccgctctcggaagctttcgtctcgtgggtgcgaaaggtaaccgaagcggctcaggaaggcagctgtcactgagcccctggaacagagcgagagtatccttccggttccggggaggggccgagttttcttcgaagatttggggctccgcgatacagttaggatggctgtagtacctctgctgttgttggggggtttgtggagcgctgtgggagcgtccagcctgggtgtcgttacttgcggctccgtggtgaagctactcaatacgcgccacaacgtccgactgcactcacacgacgtgcgctatgggtcaggtagtgggcagcagtcagtgacaggtgtaacctctgtggatgacagcaacagttactggaggatacgggggaagagtgccacagtgtgtgagaggggaacccccatcaagtgtggccagcccatccggctgacacatgtcaacactggccgaaacctccatagtcaccacttcacttcacctctttctggaaaccaggaagtgagtgcttttggtgaggaaggtgaaggtgattatctggatgactggacagtgctctgtaatggaccctactgggtgagagatggtgaggtgcggttcaaacactcttccactgaggtactgctgtctgtcacaggagaacaatatggtcgacctatcagtgggcaaaaagaggtgcatggcatggcccagccaagtcagaacaactactggaaagccatggaaggcatcttcatgaagcccagtgagttgttgaaggcagaagcccaccatgcagagctgtgaatctagaggctctgagccactgttaacgcacaatgttcacagacatctgttgctgcctcaccttgggatccctgccacaagttccttgggcagtggccatgtcaccattgagatgaagatatacaacagaaaatagtggctgtgtttggaagcttcagccctgcacatttgaactagtcactctcccagacttgcgtgggtcagttctttctgagtagaggacttgctggtaaaggggcagatgctttttattagtactgataaaacaaactgagggaaacatccctcttagctgggaaacttttactcttcaggagcttggcatcatggactgttaatgtatgtgattttccccctattttctctctccaaaatgataaaaacaataattttaaaaaaaaaaaaaaaaaaactcgagg

SEQ ID NO: 2620 - DNA, 714 bp, Homo sapiens
  misc_feature (364)..(364): n equals a,t,g, or c
caagcctcccaaagtgccacaccactgcgcccagctcaaataatgtctttaaatcagccccaaatccacggagccacaaggaaaataattacatcgagcagcagttaacagaatatcccaaaccccaaggtgtgacagagtaaggcctgtgcagctgcagcgtcggcgctgagcaggaaggacgcgtggagatgccggctgtggcgaccgcgtgatttgaaggcacctgtgacttctgctcctgatggggcarargctcatgaacacgactgtggtctgtggcatgctcacattggagggagtgccaggaagttcccaggcccgggacgccgcgccttctgttggtccatgcagggctcctgcntgtcttttatgagtgtaatgtcagcggtagcttagctctgattttaagctcagctgtacctcagctctggtgtagtttagtggcttagccgtggcagggaggggatggggtcggcccagccccctccccaggagggctttcctgatmtcccccatcagaacaaccccctctcagctcctaccacctgttctgtctgtcccaacatcgacctctccctcctgtctcacagctggctgtgggcctgtgagtgctcctggatggaatgtcccagatgccgtcggtcccaataaatgagcccgtagcatggcacccgatccacccaaaaaaaaaaaaaaaaaaaaaaaactcga

SEQ ID NO: 2621 - DNA, 2207 bp, Homo sapiens
  misc_feature (2202)..(2203): n equals a,t,g, or c
gaaagtcagctaggaacaggccgaggcagggagaactctccactcggaggaggagctggggtcctcttccatcccgtcttcatcctgcctggctgcgtgacctcgggaggcaccatgcaggagctgcatctgctctggtgggcgcttctcctgggcctggctcaggcctgccctgagccctgcgactgtggggaaaagtatggcttccagatcgccgactgtgcctaccgcgacctagaatccgtgccgcctggcttcccggccaatgtgactacactgagcctgtcagccaaccggctgccaggcttgccggagggtgccttcagggaggtgcccctgctgcagtcgctgtggctggcacacaatgagatccgcacggtggccgccggagccctggcctctctgagccatctcaagagcctggacctcagccacaatctcatctctgactttgcctggagcgacctgcacaacctcagtgccctccaattgctcaagatggacagcaacgagctgaccttcatcccccgcgacgccttccgcagcctccgtgctctgcgctcgctgcaactcaaccacaaccgcttgcacacattggccgagggcaccttcaccccgctcaccgcgctgtcccacctgcagatcaacgagaaccccttcgactgcacctgcggcatcgtgtggctcaagacatgggccctgaccacggccgtgtccatcccggagcaggacaacatcgcctgcacctcaccccatgtgctcaagggtacaccgctgagccgcctgccgccactgccatgctcggcgccctcagtgcagctcagctaccaacccagccaggatggtgccgagctgcggcctggttttgtgctggcactgcactgtgatgtggacgggcagccggcccctcagcttcactggcacatccagatacccagtggcattgtggagatcaccagccccaacgtgggcactgatgggcgtgccctgcctggcacccctgtggccagctcccagccgcgcttccaggcctttgccaatggcagcctgcttatccccgactttggcaagctggaggaaggcacctacagctgcctggccaccaatgagctgggcagtgctgagagctcagtggacgtggcactggccacgcccggtgagggtggtgaggacacactggggcgcaggttccatggcaaagcggttgagggaaagggctgctatacggttgacaacgaggtgcagccatcagggccggaggacaatgtggtcatcatctacctcagccgtgctgggaaccctgaggctgcagtcgcagaaggggtccctgggcagctgcccccaggcctgctcctgctgggccaaagcctcctcctcttcttcttcctcacctccttctagccccacccagggcttccctaactcctccccttgcccctaccaatgcccctttaagtgctgcaggggtctggggttggcaactcctgaggcctgcatgggtgacttcacattttcctacctctccttctaatctcttctagagcacctgctatccccaacttctagacctgctccaaactagtgactaggatagaatttgatcccctaactcactgtctgcggtgctcattgctgctaacagcattgcctgtgctctcctctcaggggcagcatgctaacggggcgacgtcctaatccaactgggagaagcctcagtggtggaattccaggcactgtgactgtcaagctggcaagggccaggattgggggaatggagctggggcttagctgggaggtggtctgaagcagacagggaatgggagaggaggatgggaagtagacagtggctggtatggctctgaggctccctggggcctgctcaagctcctcctgctccttgctgttttctgatgatttgggggcttgggagtccctttgtcctcatctgagactgaaatgtggggatccaggatggccttccttcctcttacccttcctccctcagcctgcaacctctatcctggaacctgtcctccctttctccccaactatgcatctgttgtctgctcctctgcaaaggccagccagcttgggagcagcagagaaataaacagcatttctgatgccaaaaaaaaaaaaaaaaaaaaaaaaaaaaaaaaaaaaaactcgagggggggcccgtacccaatcgccctacatganngtat

SEQ ID NO: 2622 - DNA, 978 bp, Homo sapiens
  misc_feature (4)..(4): n equals a,t,g, or c
  misc_feature (8)..(8): n equals a,t,g, or c
  misc_feature (15)..(15): n equals a,t,g, or c
  misc_feature (29)..(29): n equals a,t,g, or c
  misc_feature (42)..(42): n equals a,t,g, or c
  misc_feature (834)..(834): n equals a,t,g, or c
  misc_feature (838)..(838): n equals a,t,g, or c
aagnaatnggaatcncatgccgattcggntggggcccaggtnccatggcaaagcggttgagggaaagggctgctatacggttgacaacgaggtgcagccatcagggccggaggacaatgtggtcatcatctacctcagccgtgctgggaaccctgaggctgcagtcgcagaaggggtccctgggcagctgcccccaggcctgctcctgctgggccaaagcctcctcctcttcttcttcctcacctccttctagccccacccagggcttccctaactcctccccttgcccctaccaatgcccctttaagtgctgcaggggtctggggttggcaactcctgaggcctgcatgggtgacttcacattttcctacctctccttctaatctcttctagagcacctgctatccccaacttctagacctgctccaaactagtgactaggatagaatttgatcccctaactcactgtctgcggtgctcattgctgctaacagcattgcctgtgctctcctctcaggggcagcatgctaacggggcgacgtcytaatccaamtgggrgragcytcagtggkggaattccaggcactgtgactgtcaagytgscaagggccaggattgggggaatggagctggggcttagctgggaggtgktctgaagcagacagggaatgggagaggaggatgggaagtagacagtggctggtatggctctgaggcttccctggggcctgctcaagctcctcctgctccttgctgttttctgatgatttgggggcttgggagtccctttgtcctcatctgagactgaaatgtggggatccaggatggccttcnttcntaaaacccttcctccctcagcctgcaacctctatcctggaacctgtcctccctttctccccaactatgcatctgttgtctgctcctctgcaaaggccagccagcttgggagcagcagagaaataaacagcatttctgatg

SEQ ID NO: 2623 - DNA, 2159 bp, Homo sapiens
ggcacgagaaagtcagctaggaacaggccgaggcagggagaactctccactcggaggaggagctggggtcctcttccatcccgtcttcatcctgcctggctgcgtgacctcgggaggcaccatgcaggagctgcatctgctctggtgggcgcttctcctgggcctggctcaggcctgccctgagccctgcgactgtggggaaaagtatggcttccagatcgccgactgtgcctaccgcgacctagaatccgtgccgcctggcttcccggccaatgtgactacactgagcctgtcagccaaccggctgccaggcttgccggagggtgccttcagggaggtgcccctgctgcagtcgctgtggctggcacacaatgagatccgcacggtggccgccggagccctggcctctctgagccatctcaagagcctggacctcagccacaatctcatctctgactttgcctggagcgacctgcacaacctcagtgccctccaattgctcaagatggacagcaacgagctgaccttcatcccccgcgacgccttccgcagcctccgtgctctgcgctcgctgcaactcaaccacaaccgcttgcacacattggccgagggcaccttcaccccgctcaccgcgctgtcccacctgcagatcaacgagaaccccttcgactgcacctgcggcatcgtgtggctcaagacatgggccctgaccacggccgtgtccatcccggagcaggacaacatcgcctgcacctcaccccatgtgctcaagggtacaccgctgagccgcctgccgccactgccatgctcggcgccctcagtgcagctcagctaccaacccagccaggatggtgccgagctgcggcctggttttgtgctggcactgcactgtgatgtggacgggcagccggcccctcagcttcactggcacatccagatacccagtggcattgtggagatcaccagccccaacgtgggcactgatgggcgtgccctgcctggcacccctgtggccagctcccagccgcgcttccaggcctttgccaatggcagcctgcttatccccgactttggcaagctggaggaaggcacctacagctgcctggccaccaatgagctgggcagtgctgagagctcagtggacgtggcactggccacgcccggtgagggtggtgaggacacactggggcgcaggttccatggcaaagcggttgagggaaagggctgctatacggttgacaacgaggtgcagccatcagggccggaggacaatgtggtcatcatctacctcagccgtgctgggaaccctgaggctgcagtcgcagaaggggtccctgggcagctgcccccaggcctgctcctgctgggccaaagcctcctcctcttcttcttcctcacctccttctagccccacccagggcttccctaactcctccccttgcccctaccaatgcccctttaagtgctgcaggggtctggggttggcaactcctgaggcctgcatgggtgacttcacattttcctacctctccttctaatctcttctagagcacctgctatccccaacttctagacctgctccaaactagtgactaggatagaatttgatcccctaactcactgtctgcggtgctcattgctgctaacagcattgcctgtgctctcctctcaggggcagcatgctaacggggcgacgtcctaatccaactgggagaagcctcagtggtggaattccaggcactgtgactgtcaagctggcaagggccaggattgggggaatggagctggggcttagctgggaggtggtctgaagcagacagggaatgggagaggaggatgggaagtagacagtggctggtatggctctgaggctccctggggcctgctcaagctcctcctgctccttgctgttttctgatgatttgggggcttgggagtccctttgtcctcatctgagactgaaatgtggggatccaggatggccttccttcctcttacccttcctccctcagcctgcaacctctatcctggaacctgtcctccctttctccccaactatgcatctgttgtctgctcctctgcaaaggccagccagcttgggagcagcagagaaataaacagcatttctgatgaaaaaaaaaaaaaaaaaaaaaaaaaaa

SEQ ID NO: 2624 - DNA, 2525 bp, Homo sapiens
ccacgcgtccgaacccggcccttttcctatgaatttgggaatcttagatctgaagaactaccttgggctggcttttcccattgggtgtttcatagacttttctggtcaggacagggaagtggcctggcagcacccttgaaggcttacagactagaggagggtgatgctcacgccaggacgtaagtgggtaccatcacagaatgaccaggagcagcaagatgaggatgaggcctctgctgtcagtgctggggagaagttgggaggccaggctcgggtcctgtgtctgtactactctgtctgtaggctgtacaatggccgagccaagggccgccagtttgggtcaaagtgcaactccggggaccggattggctgtggcattgagcctgtgtcctttgatgtgcagaccgcccagatcttcttcaccaaaaatgggaagcgggtgggctctaccatcatgcccatgtccccagatggactgttcccgcagtgggcatgcactccctgggtgaggaggtgcggctgcacctcaacgctgagctgggccgtgaggacgacagcgtcatgatggtggacagttacgaggatgaatggggccggctacatgatgtcagagtctgtgggactctgctggagtacttakggaagggcaaaagcatcgtggatgtggggctggcccaggcccggcacccactcagcacccgcagccactacttcgaggtggagatcgtggaccctggagagaaatgctacatcgccctggggctggcacggaaggactatcccaagaacaggcaccctggctggagcagagggtctgtggcttatcatgcagacgatgggaagatcttccatggcagtggtgtgggggacccctttgggccacgctgttacaaaggggacatcatgggctgtggaatcatgttcccccgggactacattttggacagtgagggggacagtgatgacagttgtgacacagtgatcctgtctccgactgcccgggccgtccggaacgtgcggaatgtcatgtacctgcaccaggaaggggaagaggaagaggaggaagaggaagaggaagaggatggggaagagatagagccggagcatgagggcaggaaggtggtggttttcttcactcggaatggcaagatcattgggaagaaggatgctgttgttccttctggaggcttcttccccaccattggaatgctgagctgcggggagaaagtcaaagtagatctgcaccccttgagtggctagggcctcccctccagacctgctccttctccctgctcaccctctgctgggccaggcacccagttcctgacttcccagaggcttcgtttacccagcaggcccctggaggtgtgtagtcactctgcccccactggctcaggcccctgtcacgcttctctgtgcccacgtttctgacctggtgctgccactgttgtcagtccctgggcctgagtccctggttggacaggaatggacccaaagaatggtgttggtatgtgggtggtcccactcgctttggtcagtgggcttctgggtccccctttccctcaccggccctgtgtgggtggagaggcgtgagcaccctatctcagctgctattcgggcatgatgctttgtagagggtagagtagacagccccctcccctactcaccatggtatttctccttgaattcctctttcttgttttctttcctggttgtgtgaaccagttgctgctgtcatacccctggcagggccaggggacctctctttggtcatctctgtcctttcactggctgctgccccaggaagactcctctaggctctccatctttcccttgagagctggctccccaccccaacctgctcaggcaccacagaggatctaggtctctggctccccatacctggacccacatgggtgggtgcctgttgcatgtttaagagagaggggctgtgaggtgacagggcactagggccttcactcctttctccccttccatcctttctttaccagtgccacccatgtccctagctcccgggtattggggctgaggctctggggcctgtctccctgccagcgtgagggcaagaccccagagccttagctgagcaagcccagaggggcagcgtggcccctccctccccttttcctgccccgtcccatgcctcagcttgctgcttgtgccagttgcctgtttcgcttcagtgtttgattctagcacttacatgtgtcctccccaccaagccctctatctccttctaatccttcaacccctggccccctccccgtaacagtgacttttccagggaggaagaggcagcaggagctgttggccttggtttgcacagagcgggtagggctgtagggaaagcgggtgagctgttgtgctgctgggcctccctttggccctcgcttcccaccctacgatgtatgaaatgtatgtacagaccagagatgtttatacagccgataaagatggagtttccgtatttatcagtaaaaaaaaaaaaaaaaaaaaaactcgag

SEQ ID NO: 2625 - DNA, 1905 bp, Homo sapiens
ggcacgagccggcacccactcagcacccgcagccactacttcgaggtggagatcgtggaccctggagagaaatgctacatcgccctggggctggcacggaaggactatcccaagaacaggcaccctggctggagcagagggtctgtggcttatcatgcagacgatgggaagatcttccatggcagtggtgtgggggacccctttgggccacgctgttacaaaggggacatcatgggctgtggaatcatgttcccccgggactacattttggacagtgagggggacagtgatgacagttgtgacacagtgatcctgtctccgactgcccgggmcgtccggaacgtgcggaatgtcatgtacctgcaccaggaaggggaagaggaagaggaggaagaggaagaggaagaggatggggaagagatagagccggagcatgagggcaggaaggtggtggttttcttcactcggaatggcaagatcattgggaagaaggatgctgttgttccttctggaggcttcttccccaccattggaatgctgagctgcggggagaaagtcaaagtagatctgcaccccttgagtggctagggcctcccctccagacctgctccttctccctgctcaccctctgctgggccaggcacccagttcctgacttcccagaggcttcgtttacccagcaggcccctggaggtgtgtagtcactctgcccccactggctcaggcccctgtcacgcttctctgtgcccacgtttctgacctggtgctgccactgttgtcagtccctgggcctgagtccctggttggacaggaatggacccaaagaatggtgttggtatgtgggtggtcccactcgctttggtcagtgggcttctgggtccccctttccctcaaccggccctgtgtgggtggagaggcgtgagcaccctatctcagctgctattgckgggcatgatgctttgtagagggtagagtagacagccccctcccctactcaccatggtatttctccttgaattcctctttcttgttttctttcctggttgtgtgaaccagttgctgctgtcatacccctggcagggccaggggacctctctttggtcatctctgtcctttcactggctgctgccccaggaagactcctctaggctctccatctttcccttgagagctggctccccaccccaacctgctcaggcaccacagaggatctaggtctctggctccccatacctggacccacatgggtgggtgcctgttgcatgtttaagagagaggggctgtgaggtgacagggcactagggccttcactcctttctccccttccatcctttctttaccagtgccacccatgtccctagctcccgggtattggggctgaggctctggggcctgtctccctgccagcgtgagggcaagaccccagagccttagctgagcaagcccagaggggcagcgtggcccctccctccccttttcctgccccgtcccatgcctcagcttgctgcttgtgccagttgcctgtttcgcttcagtgtttgattctagcacttacatgtgtcctccccaccaagccctctatctccttctaatccttcaacccctggccccctccccgtaacagtgacttttccagggaggaagaggcagcaggagctgttggccttggtttgcacagagcgggtagggctgttagggaaagcgggtgagctgttgtgctgctgggcctccctttggccctcgcttcccaccctacgatgtatgaaatgtatgtacagaccagagatgtttatacagccgataaagatggagtttccgtatttatcagtaaaaaaaaaaaaaaaaaaaaaactcgagggggggcccggtacccaattcgcccttatagtgagtcgtakgrcaatt

SEQ ID NO: 2626 - DNA, 1905 bp, Homo sapiens; identical to SEQ ID NO: 2625

SEQ ID NO: 2627 - DNA, 1543 bp, Homo sapiens
  misc_feature (16)..(16): n equals a,t,g, or c
  misc_feature (31)..(31): n equals a,t,g, or c
  misc_feature (49)..(49): n equals a,t,g, or c
  misc_feature (58)..(58): n equals a,t,g, or c
  misc_feature (76)..(76): n equals a,t,g, or c
  misc_feature (111)..(111): n equals a,t,g, or c
  misc_feature (114)..(114): n equals a,t,g, or c
tcatctatgtttgtcntaagttctgaaaggnccacgtttgttttcattncaaataggnccaccgagtgggtcctgncgtggggccgggacaaccggcgcgcagtcttcaanagncaagccccccaggctgtctctgaagggtgtgtctctgcttccctttccccgtgtttattttcagacgaagccaagtggcccggggggaccctccggactcccagccttcagagaggaggcagctcgggctttcgccgcagtgcttcctgcccgtcacgtgtgtgctcctagccggggtcgggggagctggtatcttggcccttctgggaggacgcgcacagcccgaggaggcagagccccagacgggaatgggcttttcagaggtggggtgcgggcgaggggacgatgcattatttttaatatttgatttatttttccaactggacttcttcccggggctctttctgggcccagctgcctttgtgatcccgcgccccggtcctcggcctctcacctccagcgccggggcgccccctgctgtcggaagcggctgtgaccgggcagaggtgctatctgggactctgggttctcagcccggggacagcgaaccgaggggcagatgatccatcagaaaagagccggcactgcccagccccgcgcccctgcccctgcctttttccgggagcgcgccgcgccgcacccgctacggccgcttgaccccatctttgagcccggccccaagctctgggaccgtcgtgcccctcatcaaggaagagccaaggaccccaaggagaaggtcaggagcggcggtgtggatgtsccttggmtgcaggccccgccgcgcactcccttcagtccttcccttctctagggaccaggtagcatcagtgcctggatctcggccttgtgtgccctgctccctgccccacctactaagaaccaagtctggttcaccggctcccaagagctggaacccattctcagctagctgggggcccaggccaccccttccctccagacctgtgtgccttctgccctggctccagggccccccacaccgtgaccagggcgggatccctatggggctggccagtcggcaccgtgccaggcccacagtgccctgggcgtccatggaagtcgttctgtgtctttaaaatcagaaggaagacattaacctttaggctgaagaaaatgttttagtacacagcaataacttatttgtctttatccaacagccataaaatataactttaaatattctattgatagagaaaggagttcatgaaggcagaaatgcctggggcccacgaacatcccagtgtggccctggacgggacatcatgctgggcaacacagctaaaatgcgggtgaagaccagatttcttgcacatggcggtgacgggatgctccctagagagcttcaagtggattctttgctttttattttctctcttaataaaaatgtatgatgtttacattgtcagagaamaaaaaaaaaaaaaaactcgtagggggggcccgtacccaatcgcctgtgatgatggtatac

SEQ ID NO: 2628 - DNA, 3747 bp, Homo sapiens
tatagcttttgcaaaaagctatttaggtgacactatagaaggtacgcctgcaggtaccggtccggaattcccgggtcgacccacgcgtccggtggtcacggtcttactgtttcaaggtttttaaataagaaaaccaaccctgccttcgcccatgcccgcccctgcccgcagttgccaaagagccgccttgtcgctgtgggcgtcagggcttggctggctcagtgcacaacccacagtggccttcagaggctcctcctgggactgggaaccgccgcagggccaggcggacggcgtgaggtttgtgttggggctggttctgcccatgctagggggtgggggagctcccaggacagaccagccttgtttctcatgtaatgcagtgacgctgtcattaaacacgtggattcatgtgtggccgggactggctggctctaggtccccggctcgggtggggtcacacggtcctgccctagagcccccatctggccctggagctgcagaagcagcttctgaggggcttcccaggcctgcatttcacagatggggagctcagccctcgaaggccgcagagacgcctcccaggcccgtctgccagggcgccggccacaatcctgcagggccaaggactggactccaggcaagtccctgcgctccagctggacggccctgttccagggaggaggtgctcggttgacaccatcagggagggagggtgggcactgctgggctgagttcacccccagggctggccagatggggccaggagggacagagcaaggggggtgaaggccgtggtgggagggtcccatgatgatgggccagggctcgtgtagaaatgggggaattggttccccatggcccaggacagctgagaggaggtggaggggccccaggggagtgtacgtcaggctttgcggggcacgggggccactcagcagcgctggggcaggtgcctctgctgtcagctccacccgacaggcagacgaaggccagtggggccatcgcttcctggggcgaccctggcagtggttgggagacgcccagatggagggggaggctgaccaagggccccgcagggcgggctgcaacttttctgttgatcctggaatgtagctggtgcagtgagagggaaagagaattgaaaaactcaggctgccataggttctgcgatgagaggtgcaggaggcaggagcctggcccagggggtgctggtgcctccccggggtctgggcggagagaacaggaggaatggctgggaagtggctgagggagccaggaggccggggggccgggggctgcaggggaggctgtgggggtcctggcagccaggaggccccaggtggttttgaggctcgctcttgcgcggtgcctgagaagagggtgaaggagctggggcaggccccatcctgggcattggagatgatgaaaccgagcagacctggcccatgtggagctggcatgggggacacagcccagagacagagaagcttatgaggaagtgaggaggtggcgtcacaagggtggggagggggccttggggaagggcggccttggatcagaggctcaccacaagcctggcatttcagccagggctggagaaggcagggacgcctgggtgagaggcaaagggcacagccatgcaaaggccctggggcaggacggcacctggtatgcgggaggaacagagtgaggagaggagggcagggcgtgcagggccttgtgggcctcagggaggacttgggcacctaccccgagggagtggagctcctgggtgcgtgtccagatggkaaaggcagggtcgtatctgtggkgacctgacaagggcaggggaagcggagaccagggtgcaggctccgcccccacccaaggccgggcccagccagaggaggggcagggcagggcaggaggtttctggatgtttkttkkktttkttttggttttgttttgttttgtttattgtggtaaaatacaaaatctaccgtcttacagtgaggtggcgttcagtaccttcaccacgccgtgcagccatcccatctgattccagaacattctcatcacccagaaggcagccctgtccccattatgtcacctagtcacccccaggtccccctccccagtcccggcacccacgaatcctctccctgattctgtggattggtctgtcctggacatttcatagaagtgggatcacagcgtacccttctgtgtctggtgtctctcactgagcgtgacatcctcaaggtgcatccgcactgtggcctgggtcagagcttcgcacctccttgtggctgagtctcgttccagcacggtggcggcgccgtgctgatcccctcaccttcactgggtgttcggtgttctccgcctcgggagcgtcgcaggcgggtcggccacagcaggaggctacagagacacagggcagcggccacgcccacgccgcccgtcacagccaccatcgcccagtggtaaaagctcacgcaggccctgcagcagagctctgaggggcaagggtgcaggctctggatggccatgactgccagcccattggccaccttatccaagaagctcatggagccgtacacgaacgctccgctgttcgtgtggggaccgatgaggtcggccgtcatggccagcgaggtgacgaggatggtggcacagccagcacccagcagcacagccgctgcgtacacggccacacccagtccctccgccagcgccacccaggcggcaaaggccaggatcaccaggaggcctgagaagtaggtcatgttcctcccaatgcacttgttgatgggcttcatgaggaaggaggacaagaagccgctgaggtacatcaccaggggaatggtcgcgatgaacttcttgggcaggtggagcgagtaggtgaggtacatggccatgtaggtctgggacaggttcacgatgagcctggtggtcatgtacagtatgcccacctggtagaaagccggctcccggagccagtgcttccagagcagcaggggctgggccgtggcaggggccaacaggggggtgtgctcgcctggctcctccgcatgcggccggcgcctctcccgggtgcccaggtggaatagcagtgagaacacggcgccgacacccaccaccagcagggacaggttccggaacacgggcacgtcctggccccccagctggtcgctgatgctgatgtcttgggtgggctccacccgcgacgagccctgcaggtgcagcaggagccaggcggcgccgtagacggtgatgttggccaccacggtgaacgcatacctgagtgccgtgagctccaccttctcatggtcgttggtgacgagctccgggatgaggctgaggtgggagatctgtgtggaggcccagccaaactggaagatcacgatgaacgggccgtagtagaggagggcagcccactcgggcgtggccgccccacagcccaggcaggggctgaagatgaaggggaaggacagcaggacgcagacggtgccgaccaggtgccaggccttgcgcgggccgtagcgggcgcagcagctggcggcgcggtcggcctcgtagcccacgagcggtgtgcacagcccgtcggccacctggcccagcagcagcagcagccccgcgccgcgggagctgtaggcgcgcaccgagtgcaggtagagcagcaggtaggtgaaccacatggacgcgcacaggtcgttgaggaagtggcccacggcgtagctcagccgcgccaccagggacagcggccgc

SEQ ID NO: 2629 - DNA, 711 bp, Homo sapiens
  misc_feature (5)..(5): n equals a,t,g, or c
  misc_feature (112)..(112): n equals a,t,g, or c
  misc_feature (137)..(137): n equals a,t,g, or c
tgggntgcacacctccccctcccctccccatcatccaaacatctggtgtctgtcccccagtggggttggcgtgcatgtgtacatagtatttgtgactttctttggatttgtnttgtgtttttgttgactagtcctgnaaatgtttgaggctagacgggagggggccaggacccacccactgctcctgggggatgaggtcctggttttaaagccccgtcatttcaagcgggtcgatcttccacattcactggagagactctccccacctctgtctgggtggggcgcggacccctcactgtgcgcctgtgcagggggtgctggtgcacgtggcagtgtggatttccagtggtcacggtcttactgtttcaaggtttttaaataagaaaaccaaccctgccttcgcccatgcccgcccctgcccgcagttgccaaagagccgccttgtcgctgtgggcgtcagggcttggctggctcagtgcacaacccacagtggccttcagaggctcctcctgggactgggaaccgccgcagggccaggcggacggcgtgaggtttgtgttggggctggttctgcccatgctagggggtgggggagctcccaggacagaccagccttgtttctcatgtaatgcagtgacgctgtcattaaacacgtggattcatgtgtggccgggactggctggctctaagtccccggctccggttgggtca

SEQ ID NO: 2630 - DNA, 6582 bp, Homo sapiens
gcatcaaagcaactggaaccccttgaatttgatttctggagacgcgagcataatccttttgcagacatctcaacgctggctctccaggtggagcaccatggaaggcgactgtctgagctgcatgaagtatctgatgtttgtattcaatttcttcatatttctgggcggggcctgcctgctggccatcggcatctgggtcatggtggaccccaccggcttccgggagatcgtggctgccaatcctctgctcctcacgggcgcctacatcctcctggccatggggggcctgctctttctgctcggcttcctgggctgctgcggggccgtccgtgagaacaagtgtctgctgctatttttcttcctgttcatcctgatcatcttcctggcagagctctcagcagccatcctggccttcatcttcagggaaaatctcacccgagaattcttcaccaaggagctcaccaagcactaccagggcaataacgacacagacgtcttctctgccacctggaactcggtcatgatcacatttggttgctgcggggtcaacgggcctgaagactttaagtttgcatctgtgtttcgactcctgaccctggatagtgaagaggtgccggaggctgctgccggagggaaccccaaagtcgggacggggtcctgctgagccgggaggagtgcctcctgggaaggagcctattcctaaacaagcagggctgttacacggtgatcctcaacaccttcgagacctacgtctacttggccggagcccttgccatcggggtactggccatcgagcttttcgccatgatctttgccatgtgcctcttccggggcatccagtagagggtatggcctgaagcctgaagactcgccccacccaccactgcccagcacccaatgtcctcccgtgcccctccccgctgtcctcttggccccaggggagaagatgaggccatcagagatggccaggagaagggccaggggaatagagctatttttttaacaaaacaaaatgaagacaaaaatatggactgatgtatcctcgcctggactcagggcaggtgccgtgggttctccagagaccccagcacctggcccaggatgcaggctgctctagagaccaaaggaacaccaggcccagcgccctctttggtccagccagaccctgggccctctctcctcactgcaccaggacctgatgccaagaaagtgaggatttaggcaacaaggaggcaaaagcaaatctcagagaagtcatcaaagcccaggggctgcacggagattcagctgccatgtctttgaggactcggaacccacagcgcaatccctggtccactggaggatggactgttccccccttcaggccggggccaagagtgagctgctaacacggcatccaagaatggcccagctggtaggatccttgctttccccatctgttggaccaaataatctcaaaggcccagagaggacagtgaccatccacagacacacagcacaggcgtgacagttctgaaaagaagctgagttgtctccaggctgctgtcactgcatccaggactctgtcagctctgctgcccacatgcacccctggcctcagcatcccggttcccccagacaagagagggcaagtcagccaggaactgcctcctccctgctctacagctaagaaaacaccattccatgacttcccaccgcgccctcgctcctacctccccacacctctctctgagtccccaggaacacacagaggtgcacatcacattcccttgtccacactgcccgcctctcccacatgccacccccttccctgtccttccccaactccccagctccaagagtggaagaaatccccaagatcatctgggtctccctctccacacccagaactgaggcttggatatcttcttcaacatccttgccaagacttctccaccctcttgcatacctccagggacagagagcttactacctcccaaggcagcctcctgcctttggactgctctgactttagcatcagcttaatacacagaagaggtttctgtttttctgtggctctgtccatggcatcccacttgcccactctccttcctggagtgttgaggtcacacattgactcccctgagccctcttctctccaggctaaagaatcccgaaggcatcgaggccatttctgctgcaacaaggtttcctgkctcttcactgtccgcacatttcttagtattccctccaggcttgggcagggagactcgcagatgcacacccacaagtattcagttctcaaactctagacgagtgttggcaactggattgcaagatgctcctaccctgatagatcaggggtggctgctggaggctgtgctggggatctgaggtttggtctgggctcagtgggagayggcagtgcaatcctgatgagtgatgtctgccaggcaccgtaagtttgattagtgatgtctgccacgggcagggatggaaggagcagtgtgatgtctgctctcttctctcccctctgtccctcttcaggaagaaagagctcattctgtctcacaagccaccggcatcctgtatcagcttccagcctcccctcaggctttccagtcaccagggacactcggagccacagcctagagccccgtgttccctggcctgtgcgtctgcccccttctgagatgcagccagaagctctgtgcctgctgcaaagattcaggtggaccctcctctaatctcctcctgctgtgcccgccagtccttgccctcccaccaggtctctgagctcagtcttaccaaattcgccctttaacagcttgctctggcaaccccataaatgacacctgagctccgtagaagctaagctcctgagacccagggggacctgccactggtaccgcggcccagcctggggcctgggggctgcccctcttgaaccacccacatgcttagccccagctttttggaagaggcaaatggctggtctgaggatgacacacaaaaacaaaaamaaaaaacaaaaaacccatgctgggcaggactgaggcaaattgcacagctttatggctctaatccaggggcatcccaggcttctggggcccacagaagtcagagggaggacccaagagaaagggctggtcatgaagggaaatctggctaaggtgggttcaagggcagacacaagactgcccctcagcagctttctacaaatgtgccaaggaaccctcaatcagccctgattcagctcgccagccagccactggccaccctcttaggctggaaagggaagacaggcagtttctgctcctgttggcattcgctcaggctggtagctatttgcaagactgcctgaggccattccttggaggcaaggcaaagaaagctcagcccaaatcaggcttgagcctccctccagagcacagggagaaacagggtttagctggcttggtccagatacaacccacagcaggttctggtggtggctggggttgtgggggaggggtgggcagggatacctctyygtttcttttcaccccgaaatacaacagcccataacagagacttcctcggaccccactaacagggcaaggaacaagaagactacaccgctcatcacaaaccctgcctgtatcgaaagccactttcctgctctgaagctactgcctcttagagaaagggaatagctctttatgggctgggggtgagggcccctccccagggtccctgttaatttctggccttggtgctcaggcctgtccacagcctcccttgtctatgtctctatccatgcttaaggggcccggacaggatttcccaaaccagccgaggccccagcacccgccgtctccccagaagccccctcctccttcccccatgggtcatatgttgaaagtctattttaaaaactatgttccttgccgtagattgcagagctaatttatcacgtttctctcctgtgagaccccccttttatatgatatatccagaggaagttttgtaatataaaacaggacgcccacactgatggttttgcactggtttttgtgaatgtttcttacaaaaagaaaaaggaacaaagaataaatagtgaccgtgaagaaaggtggtcttgatttggggttggggatagactggggcgaggcagaagcttgacaagaggctgctgatggctggagggagctgggagaagaggcgttccaggtcaccccaaacggagcgtagagcgggcccacaccgagctttcctcgctggacttaagggcccctgtccctcacccctctgccactgcctccttcccaactgtaaatctccttgccttagagtccccctgccctccaagctgtacgtctgtcttccagatcttacctgacctgcagccccctccctcaccctcacctgcaggctccactacaattagctctaaccaagccacccagtattttgtgagcacagctgtgtgccagagcctggacagcctcatggggtaaggccacgccaccctcccatcccacagttgagtgtggaagactggatgtctcagggccagcagacgcccgacacgcagcctcattccccaggtggaatccacctgcagttatgggaggacaaaccaaccatcactattagaggattaggcctggctcagatgggggattgaggcttcggcctgagggcactgcccattggcggcaccacctgtgggcagcagcgggaggcagtggtgcctgtgggaggcagtagtggctcgtggccagaccagggctcggcagcagggaggcagctctttagggagaggcacaggcttaggtagcaagagacagatgccaggagaggggcccttcctcagggtccagcctcccattctgctctgccacgtttaccaagcagagtctcggggcatccgctgtaaccatggtggtgccaccactctgctgggtacaggccatgttgctgtatctgggtgcagggacagccaggcacagggtggacaggggtgaggacccctggcaggggcccacctggcagcagccagagcgggctgtacctatagacaccctccagccatcccccactctatgccaggatgggaagcgagtctgaggcctggggctgcttttctccctacacctgtccccagggcttgggctcgccacttccggtgtgtgcatcggtgtgctggcaggagggagaaggttgggatcagggactaacggggtgtacagcacaggctggtgggccctcagggagaagctgggcggtgggtatgcagcacaggctggtgggccctcagggagaagctgggcggtgggtatgcagcacaggctggtgggccctcagaggcagggcaggggctgttcggccccaagacagccagttgtcagcctttgccagggcgctggacagggcggggaagatgaggggaggtggcctgctgaaatgtttctacttatttcctgtgctgagttggagggccacctgatcccactcagccagaccctggaggcagcccgggctgcacgtgtggggggcagctcaccgggaagcaggcaggagtgggggacaggctgagcccagtggccatcaggccttggggtacatgccaaggggcaagagagcgctatggctttccttctgttcctcctctcccagccccaccacttacaatggtctccattgggggctgtgtgtccctttgtccgtggggctgaactcaggctggttgcagggagggggctcccagggcattccagtgtcctagggtagaggcagagtgccctagagcaaggtcccaggagagctcatcttgtcaggccaggagagtggggacaggacttctagctgggagaggacttctagctgtgtgtggcccattcttgaagaatggctgaaagggaggtgccatctcaggcagcacaccctgcctgcatgcccttggctgggctatgaaggcgcacgtgtgtgtgtttgctcacatcatgggtgtatgtgtgtctgtgtgtgtgttcaggggtgtgtatgtgtgtgtgttgtgtgtctgtgtgtgttttcagggtgtgcatgtggagagggccagattgaggaggaggggtacagggttttccaggattagaaggaagccaagtttagctgcttgggcactaggttggctgggagtgtagggagaaggatggggggtggtcacagcctctctcaaaagcaagaagggcttcctggcagaagaggctggaccctcgacttagcccactaccctcatgactccagcttgactttagtcagtgtctattgagggggtctggaggccaagagacccaaggaaaggaggtatcactgtgagggtgaagaacagggcagcagaggccctgtctctccccagaccagcatgtcaagcctgaaagcccaggagatcacagcacacggggtgcccaggaggaaaggaaggccccccaccccctgcctccctggggcaggactggggcagggcaggggaccctcctgccttccaggagccaaagggaagccgaggccccagcgccactctggcccaggcatgggcagggccccaggcccwgcgggcaactaggccttcttggg

SEQ ID NO: 2631 - DNA, 804 bp, Homo sapiens
  misc_feature (5)..(5): n equals a,t,g, or c
acgcnattgcttcatatccccggtttaggagtgctagammctatyyatttatttttgagacagagtctcactctgtcacccaggctggagtgcagtggcatgatcttggctcactgcaaactctgccttttgggttcaagcgactctcgtgcctcagcctcctgagtagctaggattacaggtgtgtgccaccatgcccgtctcatttttatatttttagtagagatggggttttgccatattggccaggctggtctcgaactcctggcctcatgtgatcagcccaccttggcctcccmaagtgctgggatttcaggcgtgagccaccacacccggccaaaactgtttattcttgagaagttccatcttcatttctgccacagttggaacttcccgaggaaggaaggaggcctgaggttttgcacaatctgtttcagagcctgtttagactcaaacctatgcttcccttggcagcagaatacacttaacctaaagcagtatttggagttgagaaaaacctggtggggtaagtgaatatgtactgtttggtagggtaggtagagaagctgtgctttgaccctgtgattccatctttttctaccttctatgatggtgatgaagctagatacccctagggaagaaagaaggactgggtttagcaaaaatgatttggtaattaaagtttatttgaacacaaaaaaaaaaaaaaaaaaaaaaaaaaaaaaaaaaaaaaaaaaaaaaaaaaaaaaaaaaaaaaaaaaaaaaaaaaaaaaaaaaaaaccaaaaaaaaaaaaaaaaacaaaa

SEQ ID NO: 2632 - DNA, 2068 bp, Homo sapiens; identical to SEQ ID NO: 1743
  misc_feature (2061)..(2061): n equals a,t,g, or c

SEQ ID NO: 2633 - DNA, 925 bp, Homo sapiens
tctgcctgaacccacaaatgccaatgtcaagaaggttggcatggaagacactgcaataaaaggtacgaagccagcctcatacatgccctgaggccagcaggcgcccagctcaggcagyacacgccttcacttaaaaaggccgaggascggcgggayccacctgaatccaattacatctggtgaactccgacatctgaamcgttttaagttmcaccaagttcatagcctttgttaacctttcatgtgttgaatgttcaaataatgttcattacacttaagaatactggcctgaattttattagcttcattataaatcactgagctgatatttactcttccttttaagttttctaagtacgtctgtagcatgatggtatagattttcttgtttcagtgctttgggacagattttatattatgtcaattgatcaggttaaaattttcagtgtgtagttggcagatattttcaaaattacaatgcatttatggtgtctgggggcaggggaacatcagaaaggttaaattgggcaaaaatgcgtaagtcacaagaatttggatggtgcagttaatgttgaagttacagcatttcagattttattgtcagatatttagatgtttgttacatttttaaaaattgctcttaatttttaaactctcaatacaatatattttgaccttaccattattccagagattcagtattaaaaaaaaaaaaattacactgtggtagtggcatttaaacaatataatatattctaaacacaatgaaatagggaatataatgtatgaactttttgcattggcttgaagcaatataatatattgtaaacaaaacacagctcttacctaataaacattttatactgtttgtatgtataaaataaaggtgctgctttagttttcwraaaaaaaaaaaaaaactcga

SEQ ID NO: 2634 - DNA, 1965 bp, Homo sapiens
gcagccgtctaaacgggaacagccctggctgagggagctgcagcgcacagagtatctgacggcgccaggttgcgtaggtgcggcacgaggagttttcccggcagcgaggaggtcctgagcagcatggcccggaggagcgccttccctgccgccgcgctctggctctggagcatcctcctgtgcctgctggcactgcgggcggaggccgggccgccgcaggaggagagcctgtacctatggatcgatgctcaccaggcaagagtactcataggatttgaagaagatatcctgattgtttcagaggggaaaatggcaccttttacacatgatttcagaaaagcgcaacagagaatgccagctattcctgtcaatatccattccatgaattttacctggcaagctgcagggcaggcagaatacttctatgaattcctgtccttgcgctccctggataaaggcatcatggcagatccaaccgtcaatgtccctctgctgggaacagtgcctcacaaggcatcagttgttcaagttggtttcccatgtcttggaaaacaggatggggtggcagcatttgaagtggatgtgattgttatgaattctgaaggcaacaccattctccaaacacctcaaaatgctatcttctttaaaacatgtcaacaagctgagtgcccaggcgggtgccgaaatggaggcttttgtaatgaaagacgcatctgcgagtgtcctgatgggttccacggacctcactgtgagaaagccctttgtaccccacgatgtatgaatggtggactttgtgtgactcctggtttctgcatctgcccacctggattctatggagtgaactgtgacaaagcaaactgctcaaccacctgctttaatggagggacctgtttctaccctggaaaatgtatttgccctccaggactagagggagagcagtgtgaaatcagcaaatgcccacaaccctgtcgaaatggaggtaaatgcattggtaaaagcaaatgtaagtgttccaaaggttaccagggagacctctgttcaaagcctgtctgcgagcctggctgtggtgcacatggaacctgccatgaacccaacaaatgccaatgtcaagaaggttggcatggaagacactgcaataaaaggtacgaagccagcctcatacatgccctgaggccagcaggcgcccagctcaggcagcacacgccttcacttaaaaaggccgaggagcggcgggatccacctgaatccaattacatctggtgaactccgacatctgaaacgttttaagttacaccaagttcatagcctttgttaacctttcatgtgttgaatgttcaaataatgttcattacacttaagaatactggcctgaattttattagcttcattataaatcactgagctgatatttactcttccttttaagttttctaagtacgtctgtagcatgatggtatagattttcttgtttcagtgctttgggacagattttatattatgtcaattgatcaggttaaaattttcagtgtgtagttggcagatattttcaaaattacaatgcatttatggtgtctgggggcaggggaacatcagaaaggttaaattgggcaaaaatgcgtaagtcacaagaatttggatggtgcagttaatgttgaagttacagcatttcagattttattgtcagatatttagatgtttgttacatttttaaaaattgctcttaatttttaaactctcaatacaatatattttgaccttaccattattccagagattcagtattaaaaaaaaaaaattacactgtggtagtggcatttaaacaatataatatattctaaacacaatgaaatagggaatataatgtatgaactttttgcattggcttgaagcaatataatatattgtaaacaaaacacagctcttacctaataaacattttatactgttaaaaaaaaaaaaaaaaaa

SEQ ID NO: 2635 - DNA, 2189 bp, Homo sapiens; identical to SEQ ID NO: 382

SEQ ID NO: 2636 - DNA, 1149 bp, Homo sapiens
  misc_feature (3)..(4): n equals a,t,g, or c
  misc_feature (6)..(9): n equals a,t,g, or c
  misc_feature (11)..(12): n equals a,t,g, or c
  misc_feature (15)..(15): n equals a,t,g, or c
tanncnnnnanntanggcaagccggatttgagagctacagccacaaggatggggctgggccatgtccatagggccagaaaagtggttcagtggcattgttgggtaggagcttgagatgcctgctgggccctgtccccacccaaagatgggaagaatctgagctggaggcaactggccaccttgcctaggagagaacttcaggcaccaagttaaaaaagactcccatgaagaaactgccaccttctacccgctgcagtcttggatggtctacccatgcagaaatcagtggccaggaaggcagggcctactgctgggatatcaggggcaagtgcccagtccaagaaagccactgtaatgtcctgtaggcaaagccaggtccagtggacagcctcactgagctgtgtcttcatgcagtcccaggtcacctcacctctgcatgcctcatggcagtgctcctgggcccaggccagggcctcaagcaagaggtgccacagtggcagcagcacattctggtggaaaagcaggggcagctctctcagatagcggagtagctgattcacggaatcggggagctggatctgtagcctctgagagagactggtgagactgtcaccaaaccacgcaaggtgagaggcacagtgggcagaaaggaagctgactgtggcattggtgtgagcccaggccagctgcaagctgggccgcaccacggtgagcaggtgggagccccagagcggcagtgtctcccccagccagctgtagccttgcagactgtaggagtagagcttggcacacgcttgttggctagcaggtaagaagccagatgatcgaagcaaccggccagtaagggaggcctggaaggagctgtgtgaccggaggtcatggcacaggaagcctacagcgaagaccagcagcaacaggaggagccgcgtccagggcagccgaggaccctgaacctgctgcaacaggcccttgcaggccatgtcacaggwgacgacatcctggttgttactgctacccttcctcagcagctcctggttggtaagcttgagggactgaatggtttcttgcaaagacttctgtaccttcttgggaatctgctcccaggagctgagcaagtgctccagcagaaggctggactrtgacaggtgc

SEQ ID NO: 2637 - DNA, 768 bp, Homo sapiens
  misc_feature (763)..(763): n equals a,t,g, or c
gcgcccaatgaagcaaacctgattgatttcacgaatgaggcagtggagcaggtggaagaggaggagtctggtgaggcccagctctctttcctcactggtggtccggcggctgccgccagctcgctcgagagagagaccgagaggttcagggagctgttgctgtatggccgtaagaaggatgctttggagcctgcacttggcttcctggagccctccgggcctggcctcccacctggtgtgccacctctgcaggaaaggagacacttgctccaggaagccaggagcccagacccagggatagtgccgcaggaggcgcctgttggaaactcactttccgagctaagcgaagaaaattttgatggaaaatttgctaatctgaccccctcgargacggtgccagactcggaggcccccccagggtgggatcgtgccgactcgggtcccacgcagccamctctgtctctctcacccgctcccgaaacaaagagacccggacaggcagccaagaaagaaacgaaggaacctaagaagggtgaatcctggttctttcgttggctacctggaaagaaaaagacagaagcttatttgccagatgacaagaacaaatcgattgtttgggatgaaaagaaaaaccagtgggtgaatttaaatgagccagaagargagaagaaagccccgcccccacctccaacctcgatgcccaagactgtgcaagctgccccgcctgccctcccagggcctcctggacccccgtgaacatgtnctcta

SEQ ID NO: 2638 - DNA, 2388 bp, Homo sapiens
  misc_feature (3)..(3): n equals a,t,g, or c
  misc_feature (12)..(12): n equals a,t,g, or c
  misc_feature (2374)..(2374): n equals a,t,g, or c
  misc_feature (2388)..(2388): n equals a,t,g, or c
ccnggagtcatnatggggtgggtaccccagagtggaaccaagctttgggcaggggtgccctgggcttacctgtgagggccagtgarccccctccctytcccagtgcccctactttgccagcagtgaacccacccctttcctgccctgcagcgtaaacattccccagcctcctacaggcagaaaaacacctccaagctgcagctgggccaggccccgcccaccaagctgttttcctaagacagccttccgagcaggctatttttggccctcgtgacagtgattgatagctgctgggaaggtataaaagcagcttgcctgcgaaggttcttcacactgctcaggaagagcctgctacggtggactgtgagactcagtgcactgtcctcctcccagcgaccccacgctggaccccctgccggaccctccacccttcggcccccaagcttcccaggggcttcctttggactggactgtccctgctcatccattctcctgccacccccagacctcctcagctccaggttgccacctcctctcgccagagtgatgaggtcccggcttctgctctccgtggcccatctgcccacaattcgggagaccacggaggagatgctgcttgggggtcctggacaggagcccccaccctctcctagcctggatgactacgtgaggtctatatctcgactggcacagcccacctctgtgctggacaaggccacggcccagggccaacccaggccaccccacaggccagcccaggcctgccggaagggccgccctgctgtgtccctgcgagacatcaccgcacgtttcagtggccagcagcccacactgcccatggctgatactgtggaccccctggactggctttttggggagtcccaggaaaagcagccaagccagagggacctgccaaggaggactggcccctctgctggcctctggggtccacatagacagatggacagcagcaagcccatgggggcccccagagggaggctctgtgaagccaggatgcctgggcattccctggcaagaccaccgcaggatgggcagcagagctctgacctaagaagctggacttttgggcagtctgcccaagccatggcctcccgccaccgcccccgccccagcagtgtcctcagaacactctactcgcacctcccggtgatccatgaactctgacccctccccagtaaaggcttctgtagagagcatgctgggtctgcatctcctctcgtctcctccatggtggtcactgcccctggcaggtctctgaaagggaaatgcttttctgcagaggcccctgcttgggcagttcacagtgagaccgaccccctctgaatatgataacagcctgtttcacatgaggagatgttaccaatcccgttcgctctgacccttgctggctgatcaccttgagcaacttacttaacatctgtgttcctcagtttctcatgggtaatatagggataattactggcacctgcctcccaggccattctgacgtgtaaccgcatataggagcccactggctgagtagctaccatcatcgctggtggggaaactggtggtaggggtgtgagggtagtgggggtgtcagccccccaggtgtttcagaacaaggcctcgggcactcccaagtctgcctcttggctcccaccctcaaagcccatgttctgtgaggcccaagagaacacatggagtcttagcaaatgcactaatgtattccgggggactgtcacctggcaccactggggcactctgctggctacaactcatacgtcctgtggtggcattgggagagttcccccatgatgagggccaagatagaatctgtaccactcagtgctaccatccccacccctacaccacttccacacaggggcctcatggcatggtcagggtcccagctgtgggtgagagcagggcactgtccagctgtccactggggaagtcaagatgtcctaaggcccaggycagggcatctggagtctgaaggaccctagttcctagaggcatctggcagcaagaaggtgaggcatcagggaacgggaatcaggctgggactgatcagaggtgaagggacagagagaggagaggaggaagattgagctgggggcaacagccaagctcacctgggcaggtctctgccacctccttgctctgtgagctgtcagtctaggttattctctttttttgtggctatttttaattgctttggatttgttaaatgttttctgtcttctgttaagtgtgttttctctggagatagaatgtaaaccatattaaaaggaaaaagtttcagacaarmaaaaaaaaaaaaaaaaaaaaaaaaaaaaaaaaaaaaaaaaaaaaaaaaaaaaaaaaaaanccccgggggggggn

SEQ ID NO: 2639 - DNA, 874 bp, Homo sapiens
  misc_feature (874)..(874): n equals a,t,g, or c
gggaatcaaaggcctgagttggccacgagcttcttccaaaaaaagccaaagatttgggagtgacttgggtccttattttcaagagccatgtctctgggaagactctcctggtccagcccaccctccatggtccctcggtcccctgctctcctctcccccactggcccccagatggaggtgtggaggctcatggagtccgtggcagggctgtggggcctcataacactatgtctccagctggtggttcccaagctgttcatccccaaggcccccagttatcatctcctccaacagacttcacactttagaaggctgtctatgaagttaagagcacttcaataatgactttctttcatcatttttactaatcagaggcgcatctaattgctaatcacagcttctgagctgcagaaggttacacactaaatgatggcaaagaaagaccatttcgtcattaaattagtctgtggggccttaacacaggcaaagtatagggtttctttcaagctttttgaagtattggaaagaacataagggccgggcacagtggctcacacctgtaatcccagcactttgggaggctgaggcgggcagatcatgaggtcaggggtttgagaccagcctggccaacatggtgaaaccccgtctctactaaaaatacaaaaattagccgggcgtggtggcatacgcctgtaatcccagctactcgggaggctgaggcaggagaatcgcttcaacccgggaggcggaggttgcagtgagccgagatcacgccactgcactccagcctgggtgacagagcgagactccatttaaaaaaaaaaaaaaaaaactcgaagggggggctccgtacccaattcgccccttatgagtn

SEQ ID NO: 2640 - DNA, 3588 bp, Homo sapiens; identical to SEQ ID NO: 414

SEQ ID NO: 2641 - DNA, 2431 bp, Homo sapiens
gaattcggcacgagctctcgggcaagacctcctacttccacctgctcacctggtcactcccctttgtcctcactgtggcaatccttgctgtggcgcaggtggatggggactctgtgagtggcatttgttttgtgggctacaagaactaccgataccgtgcgggcttcgtgctggccccaatcggcctggtgctcatcgtgggaggctacttcctcatccgaggagtcatgactctgttctccatcaagagcaaccaccccgggctgctgagtgagaaggctgccagcaagatcaacgagaccatgctgcgcctgggcatttttggcttcctggcctttggctttgtgctcattaccttcagctgccacttctacgacttcttcaaccaggctgagtgggagcgcagcttccgggactatgtgctatgtcaggccaatgtgaccatcgggctgcccaccaagcagcccatccctgactgtgagatcaagaatcgcccgagccttctggtggagaagatcaacctgtttgccatgtttggaactggcatcgccatgagcacctgggtctggaccaaggccacgctgctcatctggaggcgtacctggtgcaggttgactgggcagagtgacgatgagccaaagcggatcaagaagagcaagatgattgccaaggccttctctaagcggcacgagctcctgcagaacccaggccaggagctgtccttcagcatgcacactgtgtcccacgacgggcccgtggcgggcttggcctttgacctcaatgagccctcagctgatgtctcctctgcctgggcccagcatgtcaccaagatggtggctcggagaggagccatactgccccaggatatttctgtcacccctgtggcaactccagtgcccccagaggaacaagccaacctgtggctggttgaggcagagatctccccagagctgcagaagcgcctgggccggaagaagaagaggaggaagaggaagaaggaggtgtgcccgctggcgccgccccctgagcttcacccccctgcccctgcccccagtaccattcctcgactgcctcagctgccccggcagaaatgcctggtggctgcaggtgcctggggagctggggactcttgccgacagggagcgtggaccctggtctccaacccattctgcccagagcccagtccccctcaggatccatttctgcccagtgcaccggcccccgtggcatgggctcatggccgccgacagggcctggggcctattcactcccgcaccaacctgatggacacagaactcatggatgcagactcggacttctgagcctgcagagcaggacctgggacaggaaagagaggaaccaataccttcaaggctcttcttcctcaccgagcatgcttccctaggatcccgtcttccagagaacctgtgggctgactgccctccgaagagagttctggatgtctggctcaaagcagcaggactgtgggaaagagcctaacatctccatggggaggcctcaccccagggacagggccctggagctcagggtccttgtttctgccctgccagctgcagcctggttggcagcatctgctccatcggggcagggggtatgcagagcttgtggtggggcaggaacggtggaggcagaggtgacagttcccagagtgggctttggtggccagggaggcagcctagcctatgtctggcagatgagggctggctgccgttttctgggctgatgggtgccctttcctggcagtctcagtccaaaagtgttgactgtgtcattagtcctttgtctaagtagggccagggcaccgtattcctctcccaggtgtttgtggggctggaaggacctgctcccacaggggccatgtcctctcttaataggtggcactaccccaaacccatcttttgttctcctatatcctccttctcctgttccatttcagttcagtttcagcggtgccaacctctttgcgtttcctttttgttgatgaggacccagagctgctgcacacactcacctctaaccccctcccctcgctgctgggccccatctccacaggagagactggttcggctctagggcctcagtctggagtgggataggagcagtgagtgacaaagcctctgaaagatgcatcgtctcttcctcacacccatttagtgggggatgggtcctctagacttgaggggctaccctgggaagctgccgtagcttcagccaggcaagaaagcttccttcaacctgcatagccggtgggtgaggagattcccaccttccatagcctccaaacatgttcccaaggccccactttcaagaatcagacagcaggaagccatagatgctggctgggttccaggttatggggagaagaaatacagtcaataaaaggtttttgtataaaaaaaaaaaaaaaaaa

SEQ ID NO: 2642 - DNA, 1422 bp, Homo sapiens
ggcacgaggggattagacagtgaggaaggctggaggcctctgttccaaaagacagggagcggaaacagggagagcagtctctggctccttctccgtttgccagccctgtctgccaccctcctggccatggtgaccaccttgacagggccaagaacagcccacctcaggcaccgagcacccgtgaccatggtagttggagcctcagtcccccccctgagcgctgtggcctccgctctgtggaccaccgactccggctcttcctggatgttgaggtgttcagcgatgcccaggaggagttccagtgctgcctcaaggtgccagtggcattggcaggccacactggggagttcatgtgccttgtggttgtgtctgaccgcagctgtacctgttgaaggtgactggggagatgcgtgacctccagctagctggctgcagctgaccctggctgttcccctgcaggatctgagtggcatagagctgggcctggcaggcagagcctgcgggctagagtgggcagctggggcgggccgctgtgtgctgctgccccgagatgccaggcattgccgggccttcctagaggagctccttgatgtcttgcagtctctgccccctgcctggaggaactgtgtcagtgccacagaggaggaggtcaccccccagcaccggctctggccattgctggaaaaagactcatccttggaggctcgccagttcttctaccttcgggcgttcctggttgaaggcccttccacctgcctcgtatccctgttgctgactccgtccaccctgttcctgttagatgaggatgctgcagggtccccggcagagccctctcctccagcagcatctggcgaagcctctgagaaggtgcctccctcggggccgggccctgctgtgcgtgtcagggagcagcagccactcagcagcctgagctccgtgctgctctaccgctcagcccctgaggacttgcggctgctcttctacgatgaggtgtcccggctggagagcttttgggcactccgtgtggtgtgtcaggagcagctgacagccctgcttgcctggatccgggaaccatgggaggagctgttttccatcggactccggacagtgatccaagaggcgctggcccttgaccgatgagggtcccacgctgaccttggccctgacctcaggagccacgctgtagacattccctctcctggtctctgggtctggcttccaggctctggctgtggatgtcttcagcctctgggtgctggccagtgaggtcccaaatgacccagggcttaagggagaggcgagagaatgatctggcctcaggggacaggccacctggtcaggaggaatatttttcctgcactttttctcaggtatcaataaagttgtttccaactcataaaaaaaaaaaaaaaaaaaaattac

SEQ ID NO: 2643 - DNA, 752 bp, Homo sapiens
ggcacgagcttttttaatggctgaataatatcctatcgtgcgtatatacctcattttctttgatttttctttctttcttttcaaatagagatgaggtctcactatattgcccaggctggtcttgaactttagggctcaagcaatcttcctgccttggcctcccaaagtgctgggattccaggctaaaccattgtgctcctttatgcatttttctttttttaagacagaatctagctccgttgcccagaatggagtgcagtggcacgatcttggctcactgcagcctccacctcctgggttgaaatgattctcgtgcctcagcctcccgagtagctgggattacaggcacccaccaccacggcccagctaattttggatttttagtagagatggggtttcaccatgttggccaggctggtctcaaactcctgacctcaggtgtttcacctgcctcggcctcccaaagtgctgggattacaggcatgagccaccgcgcccagcccctttgtgcacttttaaaaacatatcttagaatttgtgatatatgttttattttcattttcatttggttcacaatatagtaaaatttctattatgacttactctttgacccatgatttgttttaaaacgtattgtttaattttcaaacatttagggatttcccagatatctttgttgttggtttctaatttgattccattatggttagagaccatacttggtatgatgaattaaaaaaaaaaaaaaaaaa

SEQ ID NO: 2644 - DNA, 904 bp, Homo sapiens
ggcacgagccaggagacaaatgacttacagatcccccgacatgcctcttccccttggcaagctcagttgccctgatagtagcacgtttctgtttctgatgtaccttttttctcttcttctttgcatcagccaattcccagaatttccccaggcaatttgtagaggacctttttggggtcctatatgagccatgtcctcaaagcttttaaacctccttgctctcctacaatattcagtacatgaccactgtcatcctagaaggcttctgaaaagaggggcaagagccactctgcgccacaaaggttgggtccatcttctctccgaggttgtgaaagttttcaaattgtactaataggctggggccctgacttggctgtgggctttgggaggggtaagctgctttctagatctctcccagtgaggcatggaggtgtttctgaattttgtctacctcacagggatgttgtgaggcttgaaaaggtcaaaaaatgatggccccttgagctctttgtaagaaaggtagatgaaatatcggatgtaatctgaaaaaaagataaaatgtgacttcccctgctctgtgcagcagtcgggctggatgctctgtggcctttcttgggtcctcatgccaccccacagctccaggaaccttgaagccaatctgggggactttcagatgtttgacaaagaggtaccaggcaaacttcctgctacacatgccctgaatgaattgctaaatttcaaaggaaatggaccctgcttttaaggatgtacaaaagtatgtctgcatcgatgtctgtactgtaaatttctaatttatcactgtacaaagaaaaccccttgctatttaattttgtattaaaggaaaataaagttttgtttgttaaaaaaaaaaaaaaaaaaaaaa

SEQ ID NO: 2645 - DNA, 1289 bp, Homo sapiens
gagccaccacacctggcctggaaggaacctcttaaaatcagtttacgtcttgtattttgttctgtgatggaggacactggagagagttgctattccagtcaatcatgtcgagtcactggactctgaaaatcctattggttcctttattttatttgagtttagagttcccttctgggtttgtattatgtctggcaaatgacctgggttatcacttttcctccagggttagatcatagatcttggaaactccttagagagcattttgctcctaccaaggatcagatactggagccccacataatagatttcatttcactctagcctacatagagctttctgttgctgtctcttgccatgcacttgtgcggtgattacacacttgacagtaccaggagacaaatgacttacagatcccccgacatgcctcttccccttggcaagctcagttgccctgatagtagcaygtttctgtttctgatgtaccttttttctcttcttctttgcatcagccaattcccagaatttccccaggcaatttgtagaggacctttttggggtcctatatgagccatgtcctcaaagcttttaaacctccttgctctcctacaatattcagtacatgaccactgtcatcctagaaggcttctgaaaagaggggcaagagccactctgcgccacaaaggttgggtccatcttctctccgaggttgtgaaagttttcaaattgtactaataggctggggccctgacttggctgtgggctttgggaggggtaagctgctttctagatctctcccagtgaggcatggaggtgtttctgaattttgtctacctcacagggatgttgtgaggcttgaaaaggtcaaaaaatgatggccccttgagctctttgtaagaaaggtagatgaaatatcggatgtaatctgaaaaaaagataaaatgtgacttcccctgctctgtgcagcagtcgggctggatgctctgtggcctttcttgggtcctcatgccaccccacagctccaggaaccttgaagccaatctgggggactttcagatgtttgacaaagaggtaccaggcaaacttcctgctacacatgccctgaatgaattgctaaatttcaaaggaaatggaccctgcttttaaggatgtacaaaagtatgtctgcatcgatgtctgtactgtaaatttctaatttatcactgtacaaagaaaaccccttgctatttaattttgtattaaaggaaaataaagttttgtttgttaaaaaaaaaaaaaaaaaaaaaactcga

SEQ ID NO: 2646 - DNA, 409 bp, Homo sapiens
catatataaggctgcattatttttatttaaggaaaaaaaaagaaaaagaaaagcaatcatttcatggcaactgaagccacttctaatattcaactatttcagaagtttaaagtcaattcttaacacaaattctaacttcagcagaaatcaatgttactcatgggaggtaggaatagaaacaaaaaggttaaaaaatacaataaaaagaaaagacaaaaggtaaatggaaattctgatgatatgctgaattcaggaactctgctatcaaacctgtactttaccaatagttctatgacaagagatcctaatgccagaaaaagaggccaacacaggtttctccattaaagctgccacagccattattactatccccaaatgaaaatgactcaagtacatttatagcaatatc

SEQ ID NO: 2647 - DNA, 920 bp, Homo sapiens
gaattcggcacgagatgaaataaggcatgggccaaaagaactgcagtgatgggcagagatactggggtgcccagtgccccagtggagcatcttgttttctgggaatgctcgccgcctgggcatggcttaggtaaggggtgggaagaagggttgcatcatgtggccagggaaaagagccacagacatcctttctctataaacctggtccttgcccgctccctactccatggctgggtgttctgggttgccaccttcaagcatgcttttttttttttgaaggtctcactctgtcacccagactgcagtgcagtggcacgatctcggctcactctcgtgccgaattcggcacgagattaaatattcctgttgtaaagataccagccaaatcttaccaagaccgaaaaaccttagatgacttgtcgctgttctgagacctgaaatttcttgagaaaaactttccttttcgagatgttagagatagcttcgtctcgttctgtattcctgtcttccttggactcccctcttccctgccttattcccagctcctcccgctcctttcttttcctttttcagcacctagagatttagaggatggggagtggagtaggtagcctctcaaagtctcttgggtctttcattttctaatcgatgtatgactaagcatcctaccagctgagtcttgtagatttcaaatactgtttcttaatcacatgagaagaaagctcattgctttcatactctgatcacaatctctttgtttcacagtagatttcgctcagataccaggatgccttcccctgtggctgtctcggaacacaggtcctggattttctaaggtctatttcactgaacaagctcaccaacattcaattttttttttattctctgaaaaaatttttaattaaaaaaaaaaaaaaaaa

SEQ ID NO: 2648 - DNA, 577 bp, Homo sapiens
  misc_feature (89)..(89): n equals a,t,g, or c
ctttgaaattaaccctcactaaagggaacaaaagctggagctccaccgcggtggcggccgctctagaactagtggatcccccgggcttnaggaattcggcacgagcttctcttccccacctccccttgtaccatgagtggcttgtctgctgtgggagggggcagcacttggaccaaaggcctgccccatggtctggacggggcaggctgggatgtgtgttccttggccactttggggctcaaagtagcatctgtgctgttagatctgatcttggctttagttttttttggccttcagctccctggtcaagcacttgtggccagtgacagactgtaaaacacactggaaatgtagtctgtttactgggcctgcaaaaccagtcgcaattggtgacactggtgtccttgatgacaattagaatcattgccgttgtctttctttttagacttttgcagtcaccaagagggcggtggggtgacacatctgtgtcacttccctgcccagagaatgcactggctgatcatttgatattaagacaggttaggccacccaccacggtgagcatgcgtgcccatca

SEQ ID NO: 2649 - DNA, 256 bp, Homo sapiens
gaattcggcacgagtgcaggcacaaggagaaagagtcaatgatgggtcactgttgcctccttgtactcctccttatcatcattctcacattcactgagccctcattatgtgaatgggccactctaggaccttatattcctactgaaaatcaggaagaaatcaagggagcatgtacagtatgtgtacttttgaatgttctagtcgactttgcagtaatatcgaaaaggtgccctaattaagtcctcagaaaaaaaaa

SEQ ID NO: 2650 - DNA, 743 bp, Homo sapiens; identical to SEQ ID NO: 1630

SEQ ID NO: 2651 - DNA, 833 bp, Homo sapiens
ggggtgctgcggattgaggtcccggttcctaacggtgggatcggtgtcctcgggatgagatttggcgtttcctcggggctttggtgggatcggtgtcctcaggatgagatttagggtttcctcggggctttcgggatcttcacctaatatccggactgcaagatggaggaaggcgggaacctaggaggcctgattaagatggtccatctactggtcttgtcaggtgcctggggcatgcaaatgtgggtgaccttcgtctcaggcttcctgcttttccgaagccttccccgacataccttcggactagtgcagagcaaactcttccccttctacttccacatctccatgggctgtgccttcatcaacctctgcatcttggcttcacagcatgcttgggctcagctcacattctgggaggccagccagctttacctgctgttcctgagccttacgctggccactgtcaacgcccgctggctggaaccccgcaccacagctgccatgtgggccctgcaaaccgtggagaaggagcgaggcctgggtggggaggtaccaggcagccaccagggtcccgatccctaccgccagctgcgagagaaggaccccaagtacagtgctctccgccagaatttcttccgctaccatgggctgtcctctctttgcaatctgggctgcgtcctgagcaatgggctctgtctcgctggccttgccctggaaataaggagcctctagcatgggccctgcatgctaataaatgcttcttcagaaaaaaaaaaaaaaaaaactcgaggggggcccggtacccaaatcgccggatatgatcgtaaacaatc

SEQ ID NO: 2652 - DNA, 995 bp, Homo sapiens
aggaaccgctttgcactgatacggatttaatcgcaccactcataggaatcttgcccccgaggccaagaatcggcaccggwggtccactttttcmaaacatcatgttytttctcatagtgccgttccactgcaagggacatcacataaaatycgatcatagaagaggatctctttcctgccgtccacatctatctggagcctgggtatgctggaggcatcatggttgaccaccatgatgcaggggctgctcagcctcttggcttgatggacgagcaggtagcagcgcttgttgtccacatcattcgcaataacaaatccctctggaaaggggacattcatgtcggcatgtagcatttcaattaactgtgtggtctttgagccaggtgctgcacacatatctaagatcttatgatgaggccgcacgttgaggagcagtggtgggatcatgctaacagcttcttgacgactaatatttccagattctgtttcactaactagaaactgatgaaacttttccaagtgtggcgattttctcaagatttttcgacttaaatttgtgtgccaggcaagttcttcaggataccaactcagtggctgtggaacttcaactttctgaccgtccacctccaggtcctccaattccttaaaatatttgttctttaagcaatggagaatctcttttgcgtggcttttgtaaccagtaattcttaaagtggccgggagcggctccctgagagcgtccatgaactggccccactcgccctcgggcacgatcttgagctcctggtagtagtgctcgaacagcttgttctccttgacgatctcggggtagcctccttcccagcccgcctcgccgcgctttccaccaccctcggcgccatcctccgcgtcctccggccgctgctgttgctggagccgccgaccccgcgaccgccgccccatagcccacgcggccgcgcacgcagcacgcagaaaccggcccgccacggccagaa

SEQ ID NO: 2653 - DNA, 982 bp, Homo sapiens
  misc_feature (5)..(5): n equals a,t,g, or c
  misc_feature (244)..(244): n equals a,t,g, or c
  misc_feature (506)..(506): n equals a,t,g, or c
gaggnaggaaacggtggctgcgcttgcgtatgtktgatgccgccgscccaccgtctactttcccaccgaccccgcttacgtctaccgcctaccagtgcgtcccccgcggactgtcattccccgaggcttgcctgactgttcagcttctctctcccgcttgtcccagagatccaactccattcttccggtcttgtcatttcagaaacctcgcaagaagctcgcccttgtcgtctcccagcgggcnttcttagctcccagcttgtttgatgggggtgcctctttttctttccaggtatagctgtccagcgacaccatcatgcattcatttctccaacaaacattttcatgggctcttgctctatactggggatgtagtggtaaatgaaatggacgaggccctgccctcgtggaacttacagtctggcaaaggaaacagacaataaaattctcagttgtctaaggaggcagagatgcatggggagaggatcagagtagggatgcggaancagcgagtggtcaggagtgtgcgtgccaaaaggcaggagacctgtgggacgtgggggcagctggggccggaacttgcgctggaggaacaccccttgcctgctggggcgagaagaggaccctttccttgggtgaaattccccatattgttaaaaggacaattaaagaaatgaaagagaggtcacctgggtgaataggcaacttagatgggcctccctgtgttcctgtcatgcctccaattctgcgtccaggtgtccggaacacatttttttctgcctttgaaaccttccagtacctctggcagagatataccataccctccttgttacctgcgtgcggaatcttaactcatcgttgtgctayatctgcaccttctgcctttgtgccttgttttgtgttttccctctccggggagaatataataaacttagctgagtccgttctaaaaaaaaaaaaaaaaaaaaaaaagggcggccgc

SEQ ID NO: 2654 - DNA, 3456 bp, Homo sapiens
  misc_feature (1155)..(1155): n equals a,t,g, or c
  misc_feature (1227)..(1227): n equals a,t,g, or c
ggtggtagtaacgatagactctaatgcctttttaaattcactgcaagtcattactgtacattaacaagaaagacaagatatgaggatgtattatataaaatagcagtaccattaggcactgctttttatgagccctgacgtctcccagttctactgttaatttctcatggtagcttcattcattgtctacttttccattataactatcttatactttaatatcactaattcatcactttatgatacagttaaccaacattttaaattgaaattcttcttttcacaggactctaattatgggagataagaaagctgggttttctgttttctgggctgatgatggcttggatacaggacccatccttcttcagagatcatgtgatgttgaacccaatgatacagtggatgcactttataatcggtttctttttcctgaaggaatcaaggccatggtagaagctgtccaactcatagctgatggaaaagctcctcgtataccccagccagaagaaggggcaacatatgaaggtatccagaaaaaggaaaatgctgagatttcttgggaccagtctgccgaagttttacataactggattcgaggtcatgataaagtccctggagcttggacagagataaatggacagatggtcactttctatggctcgacattactgaatagctctgtgcctcctggagaaccactggaaattaaaggtgccaagaagcctggtctcgttaccaaaaatggacttgttctttttggtaacgatggaaaagcactgacggtgagaaatctgcagtttgaagatggaaaaatgatccctgcctctcagtacttttcaacgggtgagacgtcagtggtagaactgacagctgaagaggtgaaagtggcagagaccatcaaggtcatctgggctggaattttaagcaatgtccccattattgaagactcaacagacttctttaaatctggagcaagctcaatggatgttgccaggctggttgaagagatcagacagaaatgtggtgggcttcagttgcagaatgaagatgtctatatggccaccaagtttgaaggctttatccaaaaggtcgtgagraaactgagaggagaagatcaagaggtgragctggttgtagattrkatttcaaagnaggtcaatgaaatcatggtaaaaatgccataccagtgtttcataaatggacagttcacagatgcagcgatgnaaagacttacgacactatcaacccamcagatggatctacaatatgcaaagtatcctacgcttctttgscggatgttgataaagcagtagcagcagcaaaagatgcttttgaaaacggtgaatggggaagaatgaatgcaagagaaagaggaagattgatgtatagacttgcagacctactggaagagaaccaagaagagctggcaactattgaagcccttgattcaggggctgtctataccttggccctgaagacacacattggaatgtctgtgcaaacattcagatattttgctggctggtgcgacaaaattcagggttctactattccaatcaaccaggcccgtccaaatcgcaatctgaccttcaccaagaaagagccactcggtgtctgtgccattattattccctggaactacccgctgatgatgctggcatggaagagtgctgcgtgtttggcagcaggcaataccttagtgctcaagccagcacaggtcacgcccttgactgctttgaagtttgcagaactgtctgtgaaagcaggctttccaaagggggtcatcaacatcattccaggctcaggtggcatagcaggacaacgtctgtctgaacatcctgacatccgcaaacttggtttcactggatccactcctattggcaaacagatcatgaagagctgtgctgktagcaacttgaagaaagtttcccttgagcttggtggcaagtctycacttataatatttaatgactgtgaacttgacaaggctgtgcgaatgggcatgggagcagtatttttcaacaaaggagagaactgtattgctgctgggcggttgttcgtggaagaatccatccacgacgaatttgtgacaagagtggtagaagaaattaaaaagatgaaaattggtgatccacttgacagatccactgatcatgggccccaaaatcataaggctcatctggaaaagctgctgcaatactgtgaaactggagtgaaagaaggggccactttggtgtacrggggaagacaagtccaaaggccaggctttttcawgagmcgaccgtgttcacagatgtggaagactacatgtacctcgccaaagrggartcctttgggcctattatggtcatttctaaattccaaaatggggacatcgatggagtgttgcagcgagcaaatagtacagagtatggtttggcctcaggggtttttacaagagacataaacaaagctatgtatgtgagtgaaaaactggaagcaggaactgtttttattaacacatacaacaagacagatgtggcggccccatttggcggagttaaacaatctggctttggaaaagacttaggtgaggaagctctaaatgaatatctcaaaaccaagacggtgacactggaatattagagcaacaccatcatcaggaaagccttgacagacagccctttacaactctggacacacttaagaagattgggtgtgttgaggcaggaggtgtcagccacaaaccaaaaaatacacagatggaccatgaagagggccaggccatgttaaagcatttacacatgtgcctgagtattttctaatacaccttccagtgatttggagttgttgcattttgactatgttgtatatcatacgtatttctaaaataccaagctgtttctcccctacctagacaaatctattcatggttcccatcttgaagatgtcagtaccatgcagttataatacacaaggtgcatttattggaaactttgtataatatgtacaggtttttaacctctgaactatacatagggggttattaaaaagattttctataagtcttctaaggaacagtataacctgtaaggaatgtgaaggtagttcttttttagtatttggaaataagatacatctttgtgcctttgatattccattttttaacccactgtgatgggtgatcaacctagaaacattatcttgagtacctactaggtaccaggtactatattatgttctgaggagtatagagaatttaatgatatgatggctggcccccacatagtttaaattttagtaaatagcttttgaagcaaattttacatatgatatagtagaaggctgatcctggtcgtatcataccatcttcctatctatgtaactttgggaaactctcgcaactcctctgagcctctgcttccctatgtgtaaagcagggatagtcaaaagcttcctcagggggaatttccc

SEQ ID NO: 2655 - DNA, 236 bp, Homo sapiens
aaaaaacacacagatgcagtaggtatagatttggccactatacaacctccctgcagtgacaatagtaaacaacacaggcatcaggtaatattcatatccaacaccaatccacacatacacaccaactaacaatatggagggtcccataaacctgagacaaaatctaggtgcagacaaagcagagagctaagacagacacaaacaaactagacaaaaaaaaaaaaaaaaaactcgta

SEQ ID NO: 2656 - DNA, 571 bp, Homo sapiens
gtgatattttgacattttaactgcagagcgaaggattgttgggcagactgaagaggcgtttctgggcattttttatttgcttgtttgtttgtttgtttgcatagtatctcctctcctttctatgcacatttgactaagtgcccacccactccagcattagagatactattaatatgcaaattttgagtggtcttccagacacgagtcttcccagactttattttctttaggggactcccctctcctgcgtatgtctggctacctgtctactctaacaggtagggctagggcaagctggcttaccttttggcaagatcatagtatgtggggaactactgaagggtagagggccatgaactctgagacgtgttattgagttgatatataaatacctcagcattttcctttttctggataccttcatatgttgccccttcttctggctggggtatacgaggagcttttccatcagctatgagttggacagcttctaccatggccttgattccttcaggaaaaagaaaccgattataaagtgcatccactgtatcwttgaattggacgtcacatg

SEQ ID NO: 2657 - DNA, 1587 bp, Homo sapiens; identical to SEQ ID NO: 1877

SEQ ID NO: 2658 - DNA, 3222 bp, Homo sapiens
  misc_feature (1842)..(1842): n equals a,t,g, or c
  misc_feature (3221)..(3221): n equals a,t,g, or c
aaagctatttaggtgacactatagaaggtacgcctgcaggtaccggtccggaattcccgggtcgacccacgcgtccgcaaaaactggagacacagaagagggctctaggaaaaagttttggatgggattatgtggaaactaccctgcgattctctgctgccagagcaggctcggcgcttccaccccagtgcagccttcccctggcggtggtgaaagagactcgggagtcgctgcttccaaagtgcccgccgtgagtgagctctcaccccagtcagccaaatgagcctcttcgggcttctcctgctgacatctgccctggccggccagagacaggggactcaggcggaatccaacctgagtagtaaattccagttttccagcaacaaggaacagaacggtaggaactatatccaagcatctggactggcatagaaaagaggagaaagaacatttaaaaggagtacaagatcctcagcatgagagaattattactgtgtctactaatggaagtattcacagcccaaggtttcctcatacttatccaagaaatacggtcttggtatggagattagtagcagtagaggaaaatgtatggatacaacttacgtttgatgaaagatttgggcttgaagacccagaagatgacatatgcaagtatgattttgtagaagttgaggaacccagtgatggaactatattagggcgctggtgtggttctggtactgtaccaggaaaacagatttctaaaggaaatcaaattaggataagatttgtatctgatgaatattttccttctgaaccagggttctgcatccactacaacattgtcatgccacaattcacagaagctgtgagtccttcagtgctacccccttcagctttgccactggacctgcttaataatgctataactgcctttagtaccttggaagaccttattcgatatcttgaaccagagagatggcagttggacttagaagatctatataggccaacttggcaacttcttggcaaggcttttgtttttggaagaaaatccagagtggtggatctgaaccttctaacagaggaggtaagattatacagctgcacacctcgtaacttctcagtgtccataagggaagaactaaagagaaccgataccattttctggccaggttgtctcctggttaaacgctgtggtgggaactgtgcctgttgtctccacaattgcaatgaatgtcaatgtgtcccaagcaaagttactaaaaaataccacgaggtccttcagttgagaccaaagaccggtgtcaggggattgcacaaatcactcaccgacgtggccctggagcaccatgaggagtgtgactgtgtgtgcagagggagcacaggrggatagccgcatcaccaccagcagctcttgcccagagctgtgcagtgcagtggctgattctattagagaacgtatgcgttatctccatccttaatctcagttgtttgcttcaaggacctttcatcttcaggatttacagtgcattctgaaagaggagacatcaaacagaattaggagttgtgcaacagctcttttgagaggaggcctaaaggacaggagaaaaggtcttcaatcgtggaaagaaaattaaatgttgtattaaatagatcaccagctagtttcagagttaccatgtacgtattccactagctgggttctgtatttcagttctttcgatacggcttagggtaatgtcagtacaggaaaaaaactgtgcaagtgagcacctgattccgttgccttgcttaactctaaagctccatgtcctgggcctaaaatcgtataaaatctggattttttttttttttttngctcatattcacatatgtaaaccagaacattctatgtactacaaacctggtttttaaaaaggaactatgttgctatgaattaaacttgtgtcrtgctgataggacagactggatttttcatatttcttattaaaatttctgccatttagaagaagagaactacattcatggtttggaagagataaacctgaaaagaagagtggccttatcttcactttatcgataagtcagtttatttgtttcattgtgtacatttttatattctccttttgacattataactgttggcttttctaatcttgttaaatatatctatttttaccaaaggtatttaatattcttttttatgacaacttagatcaactatttttagcttggtaaatttttctaaacacaattgttatagccagaggaacaaagatgatataaaatattgttgctctgacaaaaatacatgtatttcattctcgtatggtgctagagttagattaatctgcattttaaaaaactgaattggaatagaattggtaagttgcaaagactttttgaaaataattaaattatcatatcttccattcctgttattggagatgaaaataaaaagcaacttatgaaagtagacattcagatccagccattactaacctattccttttttggggaaatctgagcctagctcagaaaaacataaagcaccttgaaaaagacttggcagcttcctgataaagcgtgctgtgctgtgcagtaggaacacatcctatttattgtgatgttgtggttttattatcttaaactctgttccatacacttgtataaatacatggatatttttatgtacagaagtatgtctcttaaccagttcacttattgtactctggcaatttaaaagaaaatcagtaaaatattttgcttgtaaaatgcttaatatcgtgcctaggttatgtggtgactatttgaatcaaaaatgtattgaatcatcaaataaaagaatgtggctattttggggagaaaattaaaaaaaaaaaaaaaagggcggccgctctagaggatccctcgaggggcccaagcttacgcgtgcatgcgacgtcatagctctctccctatagtgagtcgtattataagctaggcactggccgtcgttttacaacgtcgtgactgggagatctgctagcttgggatctttgtgaaggaaccttacttctgtggtgtgacataattggacaaactacctacagagatttaaagctctaaggtaaatataaaatttttaagtgtataatgtgttaaactagctgcatatgcttgctgcttgagagttttgcttactgagtatgatttatgaaaatattatacacaggagctagtgattctaattggtna

SEQ ID NO: 2659 - DNA, 2806 bp, Homo sapiens
ccacgcgtccgcaaaaactggagacacagaagagggctctaggaaaaagttttggatgggattatgtggaaactaccctgcgattctctgctgccagagcaggctcggcgcttccaccccagtgcagccttcccctggcggtggtgaaagagactcgggagtcgctgcttccaaagtgcccgccgtgagtgagctctcaccccagtcagccaaatgagcctcttcgggcttctcctgctgacatctgccctggccggccagagacaggggactcaggcggaatccaacctgagtagtaaattccagttttccagcaacaaggaacagaacggtaggaactatatccaagcatctggactggcatagaaaagaggagaaagaacatttaaaaggagtacaagatcctcagcatgagagaattattactgtgtctactaatggaagtattcacagcccaaggtttcctcatacttatccaagaaatacggtcttggtatggagattagtagcagtagaggaaaatgtatggatacaacttacgtttgatgaaagatttgggcttgaagacccagaagatgacatatgcaagtatgattttgtagaagttgaggaacccagtgatggaactatattagggcgctggtgtggttctggtactgtaccaggaaaacagatttctaaaggaaatcaaattaggataagatttgtatctgatgaatattttccttctgaaccagggttctgcatccactacaacattgtcatgccacaattcacagaagctgtgagtccttcagtgctacccccttcagctttgccactggacctgcttaataatgctataactgcctttagtaccttggaagaccttattcgatatcttgaaccagagagatggcagttggacttagaagatctatataggccaacttggcaacttcttggcaaggcttttgtttttggaagaaaatccagagtggtggatctgaaccttctaacagaggaggtaagattatacagctgcacacctcgtaacttctcagtgtccataagggaagaactaaagagaaccgataccattttctggccaggttgtctcctggttaaacgctgtggtgggaactgtgcctgttgtctccacaattgcaatgaatgtcaatgtgtcccaagcaaagttactaaaaaataccacgaggtccttcagttgagaccaaagaccggtgtcaggggattgcacaaatcactcaccgacgtggccctggagcaccatgaggagtgtgactgtgtgtgcagagggagcacagggggatagccgcatcaccaccagcagctcttgcccagagctgtgcagtgcagtggctgattctattagagaacgtatgcgttatctccatccttaatctcagttgtttgcttcaaggacctttcatcttcaggatttacagtgcattctgaaagaggagacatcaaacagaattaggagttgtgcaacagctcttttgagaggaggcctaaaggacaggagaaaaggtcttcaatcgtggaaagaaaattaaatgttgtattaaatagatcaccagctagtttcagagttaccatgtacgtattccactagctgggttctgtatttcagttctttcgatacggcttagggtaatgtcagtacaggaaaaaaactgtgcaagtgagcacctgattccgttgccttgcttaactctaaagctccatgtcctgggcctaaaatcgtataaaatctggatttttttttttttttttgctcatattcacatatgtaaaccagaacattctatgtactacaaacctggtttttaaaaaggaactatgttgctatgaattaaacttgtgtcatgctgataggacagactggatttttcatatttcttattaaaatttctgccatttagaagaagagaactacattcatggtttggaagagataaacctgaaaagaagagtggccttatcttcactttatcgataagtcagtttatttgtttcattgtgtacatttttatattctccttttgacattataactgttggcttttctaatcttgttaaatatatctatttttaccaaaggtatttaatattcttttttatgacaacttagatcaactatttttagcttggtaaatttttctaaacacaattgttatagccagaggaacaaagatgatataaaatattgttgctctgacaaaaatacatgtatttcattctcgtatggtgctagagttagattaatctgcattttaaaaaactgaattggaatagaattggtaagttgcaaagactttttgaaaataattaaattatcatatcttccattcctgttattggagatgaaaataaaaagcaacttatgaaagtagacattcagatccagccattactaacctattccttttttggggaaatctgagcctagctcagaaaaacataaagcaccttgaaaaagacttggcagcttcctgataaagcgtgctgtgctgtgcagtaggaacacatcctatttattgtgatgttgtggttttattatcttaaactctgttccatacacttgtataaatacatggatatttttatgtacagaagtatgtctcttaaccagttcacttattgtactctggcaatttaaaagaaaatcagtaaaatattttgcttgtaaaatgcttaatatcgtgcctaggttatgtggtgactatttgaatcaaaaatgtattgaatcatcaaataaaagaatgtggctattttggggagaaaattaaaaaaaaaaaaaaaa

SEQ ID NO: 2660 - DNA, 2858 bp, Homo sapiens
cccgcgtccccaccccctcattcctccctcgccttcacccccacccccaccacttcgccacagctcaggatttgtttaaaccttgggaaactggttcaggtccaggttttgctttgatccttttcaaaaactggagacacagaagagggctctaggaaaaagttttggatgggattatgtggaaactaccctgcgattctctgctgccagagcagactcggcgcttccaccccagtgcagccttcccctggcggtggtgaaagagactcgggagtcgctgcttccaaagtgcccgccgtgagtgagctctcaccccagtcagccaaatgagcctcttcgggcttctcctgctgacatctgccctggccggccagagacaggggactcaggcggaatccaacctgagtagtaaattccagttttccagcaacaaggaacagaacggagtacaagatcctcagcatgagagaattattactgtgtctactaatggaagtattcacagcccaaggtttcctcatacttatccaagaaatacggtcttggtatggagattagtagcagtagaggaaaatgtatggatacaacttacgtttgatgaaagatttgggcttgaagacccagaagatgacatatgcaagtatgattttgtagaagttgaggaacccagtgatggaactatattagggcgctggtgtggttctggtactgtaccaggaaaacagatttctaaaggaaatcaaattaggataagatttgtatctgatgaatattttccttctgaaccagggttctgcatccactacaacattgtcatgccacaattcacagaagctgtgagtccttcagtgctacccccttcagctttgccactggacctgcttaataatgctataactgcctttagtaccttggaagaccttattcgatatcttgaaccagagagatggcagttggacttagaagatctatataggccaacttggcaacttcttggcaaggcttttgtttttggaagaaaatccagagtggtggatctgaaccttctaacagaggaggtaagattatacagctgcacacctcgtaacttctcagtgtccataagggaagaactaaagagaaccgataccattttctggccaggttgtctcctggttaaacgctgtggtgggaactgtgcctgttgtctccacaattgcaatgaatgtcaatgtgtcccaagcaaagttactaaaaaataccacgaggtccttcagttgagaccaaagaccggtgtcaggggattgcacaaatcactcaccgacgtggccctggagcaccatgaggagtgtgactgtgtgtgcagagggagcacagggggatagccgcatcaccaccagcagctcttgcccagagctgtgcagtgcagtggctgattctattagagaacgtatgcgttatctccatccttaatctcagttgtttgcttcaaggacctttcatcttcaggatttacagtgcattctgaaagaggagacatcaaacagaattaggagttgtgcaacagctcttttgagaggaggcctaaaggacaggagaaaaggtcttcaatcgtggaaagaaaattaaatgttgtattaaatagatcaccagctagtttcagagttaccatgtacgtattccactagctgggttctgtatttcagttctttcgatacggcttagggtaatgtcagtacaggaaaaaaactgtgcaagtgagcacctgattccgttgccttgcttaactctaaagctccatgtcctgggcctaaaatcgtataaaatctggatttttttttttttttttgctcatattcacatatgtaaaccagaacattctatgtactacaaacctggtttttaaaaaggaactatgttgctatgaattaaacttgtgtcatgctgataggacagactggatttttcatatttcttattaaaatttctgccatttagaagaagagaactacattcatggtttggaagagataaacctgaaaagaagagtggccttatcttcactttatcgataagtcagtttatttgtttcattgtgtacatttttatattctccttttgacattataactgttggcttttctaatcttgttaaatatatctatttttaccaaaggtatttaatattcttttttatgacaacttagatcaactatttttagcttggtaaatttttctaaacacaattgttatagccagaggaacaaagatgatataaaatattgttgctctgacaaaaatacatgtatttcattctcgtatggtgctagagttagattaatctgcattttaaaaaactgaattggaatagaattggtaagttgcaaagactttttgaaaataattaaattatcatatcttccattcctgttattggagatgaaaataaaaagcaacttatgaaagtagacattcagatccagccattactaacctattccttttttggggaaatctgagcctagctcagaaaaacataaagcaccttgaaaaagacttggcagcttcctgataaagcgtgctgtgctgtgcagtaggaacacatcctatttattgtgatgttgtggttttattatcttaaactctgttccatacacttgtataaatacatggatatttttatgtacagaagtatgtctcttaaccagttcacttattgtactctggcaatttaaaagaaaatcagtaaaatattttgcttgtaaaatgcttaatatcgtgcctaggttatgtggtgactatttgaatcaaaaatgtattgaatcatcaaataaaagaatgtggctattttggggagaaaattaaaaaaaaaaaaaaaa

SEQ ID NO: 2661 - DNA, 2793 bp, Homo sapiens
aaaaactggagacacagaagagggctctaggaaaaagttttggatgggattatgtggaaactaccctgcgattctctgctgccagagcaggctcggcgcttccaccccagtgcagccttcccctggcggtggtgaaagagactcgggagtcgctgcttccaaagtgcccgccgtgagtgagctctcaccccagtcagccaaatgagcctcttcgggcttctcctgctgacatctgccctggccggccagagacaggggactcaggcggaatccaacctgagtagtaaattccagttttccagcaacaaggaacagaacggtaggaactatatccaagcatctggactggcatagaaaagaggagaaagaacatttaaaaggagtacaagatcctcagcatgagagaattattactgtgtctactaatggaagtattcacagcccaaggtttcctcatacttatccaagaaatacggtcttggtatggagattagtagcagtagaggaaaatgtatggatacaacttacgtttgatgaaagatttgggcttgaagacccagaagatgacatatgcaagtatgattttgtagaagttgaggaacccagtgatggaactatattagggcgctggtgtggttctggtactgtaccaggaaaacagatttctaaaggaaatcaaattaggataagatttgtatctgatgaatattttccttctgaaccagggttctgcatccactacaacattgtcatgccacaattcacagaagctgtgagtccttcagtgctacccccttcagctttgccactggacctgcttaataatgctataactgcctttagtaccttggaagaccttattcgatatcttgaaccagagagatggcagttggacttagaagatctatataggccaacttggcaacttcttggcaaggcttttgtttttggaagaaaatccagagtggtggatctgaaccttctaacagaggaggtaagattatacagctgcacacctcgtaacttctcagtgtccataagggaagaactaaagagaaccgataccattttctggccaggttgtctcctggttaaacgctgtggtgggaactgtgcctgttgtctccacaattgcaatgaatgtcaatgtgtcccaagcaaagttactaaaaaataccacgaggtccttcagttgagaccaaagaccggtgtcaggggattgcacaaatcactcaccgacgtggccctggagcaccatgaggagtgtgactgtgtgtgcagagggagcacagggggatagccgcatcaccaccagcagctcttgcccagagctgtgcagtgcagtggctgattctattagagaacgtatgcgttatctccatccttaatctcagttgtttgcttcaaggacctttcatcttcaggatttacagtgcattctgaaagaggagacatcaaacagaattaggagttgtgcaacagctcttttgagaggaggcctaaaggacaggagaaaaggtcttcaatcgtggaaagaaaattaaatgttgtattaaatagatcaccagctagtttcagagttaccatgtacgtattccactagctgggttctgtatttcagttctttcgatacggcttagggtaatgtcagtacaggaaaaaaactgtgcaagtgagcacctgattccgttgccttgcttaactctaaagctccatgtcctgggcctaaaatcgtataaaatctggatttttttttttttttttgctcatattcacatatgtaaaccagaacattctatgtactacaaacctggtttttaaaaaggaactatgttgctatgaattaaacttgtgtcatgctgataggacagactggatttttcatatttcttattaaaatttctgccatttagaagaagagaactacattcatggtttggaagagataaacctgaaaagaagagtggccttatcttcactttatcgataagtcagtttatttgttcattgtgtacatttttatattctccttttgacattataactgttggcttttctaatcttgttaaatatatctatttttaccaaaggtatttaatattcttttttatgacaacttagatcaactatttttagcttggtaaatttttctaaacacaattgttatagccagaggaacaaagatgatataaaatattgttgctctgacaaaaatacatgtatttcattctcgtatggtgctagagttagattaatctgcattttaaaaaactgaattggaatagaattggtaagttgcaaagactttttgaaaataattaaattatcatatcttccattcctgttattggagatgaaaataaaaagcaacttatgaaagtagacattcagatccagccattactaacctattccttttttggggaaatctgagcctagctcagaaaaacataaagcaccttgaaaaagacttggcagcttcctgataaagcgtgctgtgctgtgcagtaggaacacatcctatttattgtgatgttgtggttttattatcttaaactctgttccatacacttgtataaatacatggatatttttatgtacagaagtatgtctcttaaccagttcacttattgtactctggcaatttaaaagaaaatcagtaaaatattttgcttgtaaaatgcttaatatcgtgcctaggttatgtggtgactatttgaatcaaaaatgtattgaatcatcaaataaaagaatgtggctattttggggagaaaattaaaaaaaaaaaaaaaa

SEQ ID NO: 2662 - DNA, 1251 bp, Homo sapiens
  misc_feature (61)..(62): n equals a,t,g, or c
  misc_feature (1208)..(1208): n equals a,t,g, or c
  misc_feature (1222)..(1222): n equals a,t,g, or c
  misc_feature (1235)..(1235): n equals a,t,g, or c
ataaggaaccctccaaagttctgctatgtggcgcggtattatcccgtattgacgcctttcnnttagcaactcggtcgccgcatacactattctcagaatgacttggttgagtactcaccagtcacagaaaagcatcttacggatggcatgacagtaagagaattatgcagtgctgccataaccatgagtgataacactgcggccaacttacttctgacaacgatcggaggaccgaaggagctaaccgcttttttgcacaacatgggggatcatgtaactcgccttgatcgttgggaaccggagctgaatgaagccataccaaacgacgagcgtgacaccacgatgcctgtagcaatggcaacaacgttgcgcaaactattaactggcgaactacttactctagcttcccggcaacaattaatagactggatggaggcggataaagttgcaggaccacttctgcgcycggcccytccggctggctggtttattgctgataaatctggagccggtgagcgtgggtytcgcggtatcattgcagcactggggccagatggtaagccctyccgtatcgtagttatctacacgacggggagtcaggcaactatggatgaacgaaatagacagatcgctgagataggtgsctcactgattaagcattggtaactgtcagaccaagtttactcatatatactttagattgatttaaaacttcatttttaatttaaaaggatctaggtgaagatcctttttgataatctcatgccataacttcgtataatgtatgctatacgaagttatggcatgaccaaaatcccttaacgtgagttttcgttccactgagcgtcagaccccgtagaaaagatcaaaggatcttcttgagatcctttttttctgcgcgtaatctgctgcttgcaaacaaaaaaaccaccgctaccagcggtggtttgtttgccggatcaagagctaccaactctttttccgaaggtaactggcttcagcagagcgcagataccaaatactggtcttctagtgtagccgtagttaggccaccacttcaagaactctgtagcaccggctacatacctcgctctgctaatcctggtaccagtggctgctkgcaagtggcgataagcgkggcttaccgggttggactcaagacgatggtaccggataaggccaacggtcgggctgaaccgggggttcgngcacacaagcccanctttgggaaccgnaaccgaaccttacacc

SEQ ID NO: 2663 - DNA, 1308 bp, Homo sapiens; identical to SEQ ID NO: 1047

SEQ ID NO: 2664 - DNA, 1285 bp, Homo sapiens; identical to SEQ ID NO: 1944
  misc_feature (1213)..(1213): n equals a,t,g, or c
  misc_feature (1217)..(1217): n equals a,t,g, or c
  misc_feature (1252)..(1252): n equals a,t,g, or c
  misc_feature (1270)..(1270): n equals a,t,g, or c
  misc_feature (1272)..(1272): n equals a,t,g, or c
  misc_feature (1275)..(1275): n equals a,t,g, or c
  misc_feature (1278)..(1278): n equals a,t,g, or c

SEQ ID NO: 2665 - DNA, 1656 bp, Homo sapiens
tgatacgcyrgctcgaaattaaccctcactaaagggaacaaaagctggagctccaccgcggtggcggccgctctagaactagtggatcccccgggctgcaggaattcggcacgagatgcccatacctagtgaggcagggtgtggcccggagctcccactttccctcagtcaccaaactgctgctggtctggtgggaaggggtggtgatgtgggggtgggggagcttagtgtcagcgcggggagggtggggggtatttatctatttatacatgggattgtacatagtcttgtggggcatgggggagccggctggaggtgagaaccctcccctctccccccaccccccggggagagcaaatgtaaaactactaatttttgtgctttatatattctatataaatatatctattttctttttacaaaaccagtttataaatggtaggggggtgtggggcggacacatggagctccccttgtgggggggccccctccattacccgacctaccgcccttttcctcaccccccaccccactccccaccccctggctgtgactgctgtaagatgggggtatagaggctgggcaattcccaccccctgttgtatagttggactatgttataacgcacaaaagagagctgaccccagggggagccagagggtgatgggttccttgcctccctttccttcccctttctgcccaagcttgtgctgcagttgaacctcttcctgggggtgggagtaggtaaggggtgggtgaggccccaaacccctctctggtagggaaccgtggggatgaagatgaagcttatatgcagttctcttctaggggctgtgggcaaagggcattttgtaattaatattttcaagaatcagatgtctggagtgtaggggtgggcttggtggtggtggacgggcgggcctgctggagggggagcttggtcgctgttgtgattttaggtttgtttttgttttgttttgaatttggggggttgtggattgttgggggtagggagattttttttttttaaagctgcttcctcaactgtttcaagctgcaaatgtttaagagaataacagcccccactcccacaggaaccgctgtaattaaatcagacagtaggaagactgggctgctgccctcaaagccacagcccttggatgttccttttccgagagcagaaggtctaggctacagggagggggagattggctcccgtgagtcaggctgtgtttggggcttgggccctgggaytgggaaaaggggatggggcagactttgtaagcatatgctaggtatccgatagtcctgtagaatttagtgaagaaaccttatacagtttttaatttttatataaactataactcagacccaagctacaaggttggaattttggttggttttttttttaagtaccctgcctgtataattgcatcagaatcccccaccccaccccccgcccccgtgtttgtattttgggttggtttacactcgcacatactcagttttcagttttcccctttacagtcttctcccctcacctccaggaccctccccctttttaaaaaataaatcgctgacaagtgtgaaaaaaaaaaaaaaaaaactcgagggggggcccggtacccaattcgccctatagtgagtcgkattaca

SEQ ID NO: 2666 - DNA, 1519 bp, Homo sapiens
ggcacgagatgcccatacctagtgaggcagggtgtggcccggagctcccactttccctcagtcaccaaactgctgctggtctggtgggaaggggtggtgatgtgggggtgggggagcttagtgtcagcgcggggagggtggggggtatttatctatttatacatgggattgtacatagtcttgtggggcatgggggagccggctggaggtgagaaccctcccctctccccccaccccccggggagagcaaatgtaaaactactaatttttgtgctttatatattctatataaatatatctattttctttttacaaaaccagtttataaatggtaggggggtgtggggcggacacatggagctccccttgtgggggggccccctccattacccgacctaccgcccttttcctcaccccccaccccactccccaccccctggctgtgactgctgtaagatgggggtatagaggctgggcaattcccaccccctgttgtatagttggactatgttataacgcacaaaagagagctgaccccagggggagccagagggtgatgggttccttgcctccctttccttcccctttctgcccaagcttgtgctgcagttgaacctcttcctgggggtgggagtaggtaaggggtgggtgaggccccaaacccctctctggtagggaaccgtggggatgaagatgaagcttatatgcagttctcttctaggggctgtgggcaaagggcattttgtaattaatattttcaagaatcagatgtctggagtgtaggggtgggcttggtggtggtggacgggcgggcctgctggagggggagcttggtcgctgttgtgattttaggtttgtttttgttttgttttgaatttggggggttgtggattgttgggggtagggagattttttttttttaaagctgcttcctcaactgtttcaagctgcaaatgtttaagagaataacagcccccactcccacaggaaccgctgtaattaaatcagacagtaggaagactgggctgctgccctcaaagccacagcccttggatgttccttttccgagagcagaaggtctaggctacagggagggggagattggctcccgtgagtcaggctgtgtttggggcttgggccctgggactgggaaaaggggatggggcagactttgtaagcatatgctaggtatccgatagtcctgtagaatttagtgaagaaaccttatacagtttttaatttttatataaactataactcagacccaagctacaaggttggaattttggttggttttttttttaagtaccctgcctgtataattgcatcagaatcccccaccccaccccccgcccccgtgtttgtattttgggttggtttacactcgcacatactcagttttcagttttcccctttacagtcttctcccctcacctccaggaccctccccctttttaaaaaataaatcgctgacaagtgtgaaaaaaaaaaaaaaaaaaaaaaaaaaaaaaaaaaaaaa

SEQ ID NO: 2667 - DNA, 987 bp, Homo sapiens; identical to SEQ ID NO: 1354
  misc_feature (31)..(31): n equals a,t,g, or c
  misc_feature (41)..(41): n equals a,t,g, or c
  misc_feature (971)..(971): n equals a,t,g, or c

SEQ ID NO: 2668 - DNA, 515 bp, Homo sapiens
  misc_feature (33)..(33): n equals a,t,g, or c
  misc_feature (63)..(63): n equals a,t,g, or c
  misc_feature (69)..(69): n equals a,t,g, or c
tttggggaattggtaacctggaaggtatggtantccaaaaccaaccaaccaaacaaaaacccnatgtgntaaaatactcagtgctaaacatggcttaatcttatttaayctkctttccctaawtataggagggaagatttttccatttgtattactgcttcccatkgrgtaatcatactcaaatgggggaaggggtgcyccttaatatatatagatatgtatatatacakgtttttctattaaaaatagacagtaaaatactattctcattatgttgatactagcatacttaaaatatctctaaaatagttaaatgtatttaattccatattgatgaagatgtttattggtatattttctttttcgtccttatatacatatgtaacagtcaaatatcatttactcttcttcattagctttgggtgcctttgccacaagacctagcctaatttaccaaggatgaattctttcaattcttcatgcgtgcccagcaaaaaaaaaaaaaaagggcggcc

SEQ ID NO: 2669 - DNA, 702 bp, Homo sapiens
tcgacccacgcgtccgagcaaccgcagcttctagtatccagactccagcgccgccccgggcgcggaccccaaccccgacccagagcttctccagcggcggcgcacgagcagggctccccgccttaacttcctccgcggggcccagccaccttcgggagtycgggttgcccacctgcaaactctccgccttctgcacctgccacccctgagccagcgcgggcgcccgagcgagtcatggccaacgcggggctgcagctgttgggcttcattctcgccttcctgggatggatcggcgccatcgtcagcactgccctgccccagtggaggatttactcctatgccggcgacaacatcgtgaccgcccaggccatgtacgaggggctgtggatgtcctgcgtgtcgcagagcaccgggcagatccagtgcaaagtctttgactccttgctgaatctgagcagcacattgcaagcaamccgtgccttgatggtggttggcatcctcctgggagtgatagcaatctttgtggccaacgttggcatgaagtgtatgaartgcttggaagamgatgaggtgcagaagatgaggatggctgtcattggggggcgcgawatttcttcttgcaggtctggctaatttwagttgccacagcatggtaatggcaatagaatcgttccaagaaatctatgaccctatggaccccca

SEQ ID NO: 2670 - DNA, 2782 bp, Homo sapiens
tctatgaccctatgaccccagtcaatgccaggtacgaatttggtcaggctctcttactggctgggctgctgcttctctctgccttctgggaggtgccctactttgctgttcctgtccccgaaaaacaacctcttacccaacaccaaggccctatccaaaacctgcaccttccagcgggaaagactacgtgtgacacagaggcaaaaggagaaaatcatgttgaaacaaaccgaaaatggacattgagatactatcattaacattaggaccttagaattttgggtattgtaatctgaagtatggtattacaaaacaaacaaacaaacaaaaaacccatgtgttaaaatactcagtgctaaacatggcttaatcttattttatcttctttcctcaatataggagggaagatttttccatttgtattactgcttcccattgagtaatcatactcaactgggggaaggggtgctccttaaatatatatagatatgtatatatacatgtttttctattaaaaatagacagtaaaatactattctcattatgttgatactagcatacttaaaatatctctaaaataggtaaatgtatttaattccatattgatgaagatgtttattggtatattttctttttcgtctatatatacatatgtaacagtcaaatatcatttactcttcttcattagctttgggtgcctttgccacaagacctagcctaatttaccaaggatgaattctttcaattcttcatgcgtgcccttttcatatacttattttattttttaccataatcttatagcacttgcatcgttattaagcccttatttgttttgtgtttcattggtctctatctcctgaatctaacacatttcatagcctacattttagtttctaaagccaagaagaatttattacaaatcagaactttggaggcaaatctttctgcatgaccaaagtgataaattcctgttgaccttcccacacaatccctgtactctgacccatagcactcttgtttgctttgaaaatatttgtccaattgagtagctgcatgctgttcccccaggtgttgtaacacaactttattgattgaatttttaagctacttattcatagttttatatccccctaaactacctttttgttccccattccttaattgtattgttttcccaagtgtaattatcatgcgttttatatcttcctaataaggtgtggtctgtttgtctgaacaaagtgctagactttctggagtgataatctggtgacaaatattctctctgtagctgtaagcaagtcacttaatctttctacctcttttttctatctgccaaattgagataatgatacttaaccagttagaagaggtagtgtgaatattaattagtttatattactctcattctttgaacatgaactatgcctatgtagtgtctttatttgctcagctggctgagacactgaagaagtcactgaacaaaacctacacacgtaccttcatgtgattcactgccttcctctctctaccagtctatttccactgaacaaaacctacacacataccttcatgtggttcagtgccttcctctctctaccagtctatttccactgaacaaaacctacgcacataccttcatgtggctgccttcctctctctaccagtctatttccattctttcagctgtgtctgacatgtttgtgctctgttccattttaacaactgctcttacttttccagtctgtacagaatgctatttcacttgagcaagatgatgtaatggaaagggtgttggcattggtgcctggagacctggatttgagtcttggtgctatcaatcaccgtctgtgtttgagcaaggcatttggctgctgtaagcttattgcttcatctgtaagcggtggtttgtaattcctgatcttcccacctcacagtgatgttgtggggatccagtgagatagaatacatgtaagtgtggttttgtaatttaaaaagtgctatactaagggaaagaattgaggaattaactgcatacgttttggtgttgcttttcaaatgtttgaaaacaaaaaaaatgttaagaaatgggtttcttgccttaaccagtctctcaagtgatgagacagtgaagtaaaattgagtgcactaaacaaataagattctgaggaagtcttatcttctgcagtgagtatggcccgatgctttctgtggctaaacagatgtaatgggaagaaataaaagcctacgtgttggtaaatccaacagcaagggagatttttgartcatwataactcataaggtgctatctgttcagtgatgccctcagagctcttgctgttagctgcmgctgacgctgctaggatagttagtttggaaatggtacttcataataaactacacaaggaaagtcagccactgtgtcttatgaggaattggacctaataaattttagtgtgccttccaaacctgagaatatatgcttttggaagttaaaatttaaatggcttttgccacatacatagatcttcatgatgtgtgagtgtaattccatgtggatatcagttaccaaacattacaaaaaaattttatggcccaaaatgaccaacgaaattgttacaatagaatttatccaattttgatctttttatattcttctaccacacctggaaacagaccaatagacattttggggttttataataggaatttgtataaagcattactctttttcaataaattgttttttaatttaaaaaaaaaaaaaaaaaaaaaaaactcgtag

SEQ ID NO: 2671 - DNA, 3453 bp, Homo sapiens; identical to SEQ ID NO: 134

SEQ ID NO: 2672 - DNA, 1122 bp, Homo sapiens
  misc_feature (1091)..(1091): n equals a,t,g, or c
gccgacgtggcctccggcggacgctccacgtgtccctcgccgcgccccgtctacccgcccctgccctgaggaccctagtccaacatggcggcgcccagcggagggtggaacggcgtcggcgcgagcttgtgggccgcgctgctcctaggggccgtggcgctgaggccggcggaggcggtgtccgagcccacgacggtggcgtttgacgtgcggcccggcggcgtcgtgcattccttctcccataacgtgggcccgggggacaaatatacgtgtatgttcacttacgcctctcaaggagggaccaatgagcaatggcagatgagtctggggaccagcgaagaccaccagcacttcacctgcaccatctggaggccccaggggaagtcctatctgtacttcacacagttcaaggcagaggtgcggggcgctgagattgagtacgccatggcctactctaaagccgcatttgaaagggaaagtgatgtccctctgaaaactgaggaatttgaagtgaccaaaacagcagtggctcacaggcccggggcattcaaagctgagctgtccaagctggtgattgtggccaaggcatcgcgcactgagctgtgaccagcagccctgttgcgggtggcaccttctcatctccggtgaagctgaaggggcctgtgtccctgaaagggccagcacatcactggttttctaggagggactcttaagttttctacctgggctgacgttgccttgtccggaggggcttgcagggtggctgaagccctggggcagagaacagagggtccagggccctcctggctcccaacagcttctcagttcccacttcctgctgagctcttctggactcaggatcgcagatccggggcacaaagagggtggggaacatgggggctatgctggggaaagcagccatgctccccccgacctccagccgagcatccttcatgagcctgcagaactgctttcctatgtttacccaggggacctcctttcagatgaactgggaagagatgaaatgttttttcatatttaaataaataagaacattaaaaagcaaaaaaaccwggggcctcccggctggncgtttgcgggtcaagagctccagaaaaaaaa

SEQ ID NO: 2673 - DNA, 2019 bp, Homo sapiens
  misc_feature (1948)..(1948): n equals a,t,g, or c
  misc_feature (1961)..(1961): n equals a,t,g, or c
ggcacgaggttttcggcctggtctcacaagctgagcctttccggccagctctgagccctgcagatgatgcaaccgagcttcactgcttgcatcaggcaggggtcccggcggcagtgagggctggaaggaggtggaacggcctctgcagagatgtgggcagctggtcaggatggccattcgggctcagcacagcaacgcagcccagactcagactggggaagcaaacaggggctggacaggccaggagagcctgtcggacagtgatcctgagatgtgggagttgctgcagagggagaaggacaggcagtgtcgtggcctggagctcattgcctcagagatactatgggggagcagaggtggtggatgaaattgagctgctgtgccagcgccgggccttggaagcctttgacctggatcctgcacagtggggagtcaatgtccagccctactccgggtccccagccaacctggccgtctacacagcccttctgcaacctcacgaccggatcatggggctggacctgcccgatgggggccatctcacccacggctacatgtctgacgtcaagcggatatcagccacgtccatcttcttcgagtctatgccctataagctcaaccccaaaactggcctcattgactacaaccagctggcactgactgctcgacttttccggccacggctcatcatagctggcaccagcgcctatgctcgcctcattgactacgcccgcatgagagaggtgtgtgatgaagtcaaagcacacctgctggcagacatggcccacatcagtggcctggtggctgccaaggtgattccctcgcctttcaagcacgcggacatcgtcaccaccactactcacaagactcttcgaggggccaggtcagggctcatcttctaccggaaaggggtgaaggctgtggaccccaagactggccgggagatcccttacacatttgaggaccgaatcaactttgccgtgttcccatccctgcaggggggcccccacaatcatgccattgctgcagtagctgtggccctaaagcaggcctgcacccccatgttccgggagtactccctgcaggttctgaagaatgctcgggccatggcagatgccctgctagagcgaggctactcactggtatcaggtggtactgacaaccacctggtgctggtggacctgcggcccaagggcctggatggagctcgggctgagcgggtgctagagcttgtatccatcactgccaacaagaacacctgtcctggagaccgaagtgccatcacaccgggcggcctgcggcttggggccccagccttaacttctcgacagttccgtgaggatgacttccggagagttgtggactttatagatgaaggggtcaacattggcttagaggtgaagagcaagactgccaagctccaggatttcaaatccttcctgcttaaggactcagaaacaagtcagcgtctggccaacctcaggcaacgggtggagcagtttgccagggccttccccatgcctggttttgatgagcattgaaggcacctgggaaatgaggcccacagactcaaagttactctccttccccctacctgggccagtgaaatagaaagcctttctattttttggtgcgggagggaagacctctcacttagggcaagagccaggtatagtctcccttcccagaatttgtaactgagaagatcttttctttttcctttttttggtaacaagacttagaaggagggcccaggcactttctgtttgaacccctgtcatgatcacagtgtcagagacgcgtcctctttcttggggaagttgaggagtgcccttcagagccagtagcaggcaggggtgggtaggcaccctccttcctgtttttatctaataaaatgctaacctgcaaaaaaaaaaaaaaaaaagtcaggctccaaatatgtaacagntgagtttctaagntgagtcacacggaccgcggttggtttcccagtggaggcataactcatcgcttcactct

SEQ ID NO: 2674 - DNA, 764 bp, Homo sapiens
ccttgccaactctgcctcttcccccgctgactggggtatcagtttatggtgccctgcaggaagaccctcttgttcctgtgggtgggaagcctctgcagagatgtgggcagctggtcaggatggccattcgggctcagcacagcaacgcagcccagactcagactggggaagcaaacaggggctggacaggccaggagagcctgtcggacagtgatcctgagatgtgggagttgctgcagagggagaaggacaggcagtgtcgtggcctggagctcattgcctcagagaacttctgcagccgagctgcgctggaggccctggggtcctgtctgaacaacaagtactcggagggttatcctggcaagagatactatgggggagcagaggtggtggatgaaattgagctgctgtgccagcgccgggccttggaagcctttgacctggatcctgcacagtggggagtcaatgtccagccctactccgggtccccagccaacctggccgtytacacagcccttctgcaacctcacgaccggatcatggggctggacctgcccgatgggggccatctcacccacggctacatgtctgacgtcaagcggatatcagccacgtccatcttcttcgagtctatgccctataagctcaaccccaaaactggcctcattgactacaaccagctggcactgactgctcgacttttccggccacggctcatcatagctggcaccagcgcctatgctcgcctcattgactacgcccgc

SEQ ID NO: 2675 - DNA, 1708 bp, Homo sapiens
  misc_feature (1696)..(1696): n equals a,t,g, or c
  misc_feature (1708)..(1708): n equals a,t,g, or c
ggcacgagctgcctcccgcaggcgccacctgtgtcccccagcgccgctccacccagcaggcctgagcccctctctgctgccagacaccccctgctgcccactctcctgctgctcgggttctgaggcacagcttgtcacaccgaggcggattctctttctctttctctttctcttctggcccacagccgcagcaatggcgctgagttcctctgctggagttcatcctgctagctgggttcccgagctgccggtctgagcctgaggcatggagcctcctggagactgggggcctcctccctggagatccacccccaaaaccgacgtcttgaggctggtgctgtatctcaccttcctgggagccccctgctacgccccagctctgccgtcctgcaaggaggacgagtacccagtgggctccgagtgctgccccaagtgcagtccaggttatcgtgtgaaggaggcctgcggggagctgacgggcacagtgtgtgaaccctgccctccaggcacctacattgcccacctcaatggcctaagcaagtgtctgcagtgccaaatgtgtgacccagccatgggcctgcgcgcgagccggaactgctccaggacagagaacgccgtgtgtggytgcagcccaggccacttctgcatcgtccaggacggggaccactgcgccgcgtgccgcgcttacgccacctccagcccgggccagagggtgcagaagggaggcaccgagagtcaggacaccctgtgtcagaactgccccccggggaccttctctcccaatgggaccctggaggaatgtcagcaccagaccaagtgcagctggctggtgacgaaggccggagctgggaccagcagctcccactgggtatggtggtttctctcagggagcctcgtcatcgtcattgtttgctccacagttggcctaatcatatgtgtgaaaagaagaaagccaaggggtgatgtagtcaaggtgatcgtctccgtccagcggaaaagacaggaggcagaaggtgaggccacagtcattgaggccctgcaggcccctccggacgtcaccacggtggccgtggaggagacaataccctcattcacggggaggagcccaaaccactgacccacagactctgcaccccgacgccagagatacctggagcgacggctgctgaaagaggctgtccacctggcgraaccaccggagcccggaggcttgggggctccgccctggrctggcttccgtctcctccagtggagggagaggtggggcccctgctggggtagagctggggacgccacgtgccattcccatgggccagtgagggcctggggcctctgttctgctgtggcctgagctccccagagtcctgaggaggagcgccagttgcccctcgctcacagaccacacacccagccctcctgggccaacccagagggcccttcagaccccagctgtctgcgcgtctgactcttgtggcctcagcaggacaggccccgggcactgcctcacagccaaggctggactgggttggctgcagtgtggtgtttagtggataccacatcggaagtgattttctaaattggatttgaattcggctcctgttttctatttgtcatgaaacagtgtatttggggagatgctgtgggaggatgtaaatatcttgtttctcctcaaaaaaaaaaaaaaaaaaaaccccgnggggggccccgn

SEQ ID NO: 2676 - DNA, 2104 bp, Homo sapiens
ccacgcgtccggcagcggtggccggctaggatgggctgtctctggggtctggctctgccccttttcttcttctgctgggaggttggggtctctgggagctctgcaggccccagcacccgcagagcagacactgcgatgacaacggacgacacagaagtgcccgctatgactctagcaccgggccacgccgctctggaaactcaaacactgagcgctgagacctcttctagggcctcaaccccagccggccccattccagaagcagagaccaggggagccaagagaatttcccctgcaagagagaccaggagtttcacaaaaacatctcccaacttcatggtgctgatcgccacctccgtggagacatcagccgccagtggcagccccgagggagctagaatgaccacagttcagaccatcacaggcagtgatcccagggaagccatctttgacaccctttgcaccgatgacagctctgaagaggcaaagacactcacaatggacatattgacattggctcacacctccacagaagctaagggcctgtcctcagagagcagtgcctcttccgacggcccccatccagtcatcaccccgtcacgggcctcagagagcagcgcctcttccgacggcccccatccagtcatcaccccgtcacgggcctcagagagcagtgcctcttccgacggcccccatccagtcatcaccccgtcacgggcctcagagagcagcgcctcttccgacggcccccatccagtcatcaccccgtcacgggcctcagagagcagcgcctcttccgacggcccccatccagtcatcaccccctcatggtccccgggatctgacgtcactctcctcgctgaagccctggtgagtgtcacaaacatcgaggttattaattgcagcatcacagaaatagaaacaacgacttccagcatccctggggcctcagacacagatctcatccccacggaaggggtgaaggcctcgtccacctccgatccaccagctctgcctgactccactgaagcaaaaccacacatcactgaggtcacagcctctgccgagaccctgtccacagccggcaccacagagtcagctgcacctgatgccacggttgggaccccactccccactaacagcgccacagaaagagaagtgacagcacccggggccacgaccctcagtggagctctggtcacagttagcaggaatcccctggaagaaacctcagccctctctgttgagacaccaagttacgtcaaagtctcaggagcagctccggtctccatagaggctgggtcagcagtgggcaaaacaacttcctttgctgggagctctgcttcctcctacagcccctcggaagccgccctcaagaacttcaccccttcagagacaccgaccatggacatcgcaaccaaggggcccttccccaccagcagggaccctcttccttctgtccctccgactacaaccaacagcagccgagggacgaacagcaccttagccaagatcacaacctcagcgaagaccacgatgaagcccccaacagccacgcccacgactgcccggacgaggccgaccacagacgtgagtgcaggtgaaaatggaggtttcctcctcctgcggctgagtgtggcttccccggaagacctcactgaccccagagtggcagaaaggctgatgcagcagctccaccgggaactccacgcccacgcgcctcacttccaggtctccttactgcgtgtcaggagaggctaacggacatcagctgcagccaggcatgtcccgtatgccaaaagagggtgctgcccctagcctgggcccccaccgacagactgcagctgcgttactgtgctgagaggtacccagaaggttcccatgaagggcagcatgtccaagcccctgaccccagatgtggcaacaggaccctcgctcacatccaccggagtgtatgtgtggggaggggcttcacctgttcccagaggtgtccttggactcaccttggcacatgttctgtgtttcagtaaagagagacctgatcaccaaaaaaaaaaaaaaaaaaaaaaaaaaaaaaaaaaaaaaaaaaaaaaaaaaaaaaaaa

SEQ ID NO: 2677 - DNA, 1242 bp, Homo sapiens
gcgtccgcacctcaggccctccaagcgcaggatgcaggccgtggccaacgtgtccattggggccatgttctgcatgtatgggctcacagcaacctttggatacctcaccttctacagtgagtggggctggggctagggctggggggagggggaaggcctggggcaggagcctctgagctctttccttctgtgaccacggacctgtcaagtttccaaacagaaaggtgtgcctcacttgtgtggattttgtcacttgtgcatgtatgtatgggtttctggggcattggtcctggtgctctctccacatcctgcatcccgtaccctctgtctcatggcccaggcagtgtgaaggcggagatgctgcacatgtacagccagaaggacccgctcatcctctgtgtgcgcctggccgtgctgctcgcggtgaccctcactgtgccagtcgtgctgttccctatccgccgggccctgcagcagctgcttttcccaggcaaggccttcagctggccacgacatgtggccatagctctgatcctgcttgttttggtcaatgtccttgtcatctgtgtgccaaccatccgggatatctttggagttatcgggtccacctcagcccccagcctcatcttcatcctccccagcatcttctacctccgcattgtaccctctgaggtggagcctttcttatcctggcccaagatccaggccctgtgctttggagtcctgggagtcctcttcatggccgtcagtctaggctttatgtttgccaactgggccacaggccagagccgcatgtctggacactgatcaggccctgctggcccaggtccctgtgcgcatgcacatggaggggtcagggccgctccctagggtccctcctgcccaacatgtggaggtggctggttcccatgaacgtggttgtcagaggcgggggacaagcagaggcttgcagactggcccacttccctcctccccaagggatgccaagcttggatcatggccctaatcccaaccccaaccccatgggaggaggaggaggaggaagaagaggaggaggaggaggaggaggaggcggaggaggaggaggccaggtcctggtggagcctttgcccagcccagtcctctctgcctcctcctggctgaagctgtttgtcaggattaccctcgggctaaagaggaaaaataaagatgttgagctaccaaaaaaaaaaaaaaaaaaaaaaaaaaaaaaaaaaaaaaaaa

SEQ ID NO: 2678 - DNA, 1932 bp, Homo sapiens
ccacgcgtccgcggcggcggcgcgcacggcccgaggaaagcggcttgcctggaatcggcggcggccatcgagacccacccgaggcgcgtctcccttggtctcccggggctcccaggccgcagcgcccgcgcccctttagctcgctcgctcgcattccttccctgcggccggctgcgccatggcgttggcgttggcggcgctggcggcggtggagccggcctgcggcagccggtaccagcagttgcagaatgaggaagagcccggagagccagaacaggctgtaggcgacgcccctccaccttacagcagcatctctgcagagagtgcagcatattttgactacaaagatgagtgtggatttccaaagcctccttcctataatgtggcgacgacgctgcccagctacgatgaagctgagagaaccaaggctgaagctactatccccttggttcctggaagagatgaggattttgtgggtcgagatgacttcgatgatgctgaccagctgaggataggaaatgatgggattttcatgttaacttttttcatggcattcctcttcaactggattggattttttctgtctttttgcctgaccacctcagctgcaggaagatatggggccatttcaggatttggtctctctctaattaagtggatcctgattgtcaggttttccacctatttccctggatattttgatggtcaatactggctctggtgggtgttcctggttttaggctttctcctgtttctcagaggatttatcaattatgcaaaggttcggaagatgccagaaactttctcaaatctccccaggaccagagttctctttatttattaaagatgttttctggcaaaggccttcctgcatttatgaattctctctgaagaagcaggagaacacctgcaggaagtgaatcaagatgcagaacacagaggaataatcacctgctttaaaaaaataaaagtactgttgaaaaagatcatttctctttatttgttcctaggtgtaaaattttaatagttaatgcaaaattctgtaatcattgaatcattagtggttaatgtttgaaaaatctctcgcaatcaagtatgtgatgtattaataatgccttatctattctttgtagtcattttaaatagcatgagccttgcccctgtagtcagtagggggcagtcttgcttcattcatcctccatctcaaaatgaacttggaattaagtattttagtgtaagatatgtataatgctggccattttaaagggggttttctcaaaagttataacttttgttttgactgcatttctgcacataatccatactcgctgttaaaattaatctagaaatttattcacttgtactgtgaagacctggaagcaaaatcatagtgcaaaatacatttaaggtgtggtcaagaatatgttcttaattggtaaaaaaataagcattaattttttatagtctgtattctaaattttgcagtcccttattctgtgttatgaacctaaaaaattgtaaagttgttgtcactgtataaaataaaaagggcaaggacaaatgcagcttatttactaagatggaattcttgacactttttgtgtgattagagtccctacccccccttttttcctttttttaggtggggggggttctcctgatgcttaggctaggggctggggtagggaggagaataggtacttaggagcaaagaaaggattagtttggaacttttgagatgatccctaacatactgtagtactacttgcttttacaatgtgttagcagaaaccgatgagttataaacgtagaatgatgtgctttctgccaagtggtaattcaccttggtttgctatgttaaaactgtaaatacaacagaacattaataaacgtctcttgtgtagcaaaaaaaaaaaaaaaaaaaaaaaaaaa

SEQ ID NO: 2679 - DNA, 1654 bp, Homo sapiens
ttttttttttttttttaaagagatggagtcttgccatcttacgcaggatggtctcaaactcctgggctcaagcgagtctcctgccttggtgtttcaaagtgctgggattacaggtgtgagccactgtgcccagccaacttctcattttaaaagaatttcagatttaaaaaaattgcaaaaatactgcgagagaatcctcatatacttttcacccagatccaccaaatgttaacatcttaaataaccatattatgatgatcaaaaccagaaatactattaactactctacagacttgactcaaaattcaccaactgtctgcctaattttagtccagggtccaattcagactcatatattgcatttagtagtcctgtctatttaatttctttaaatctggaaagtaccttagtctttctttgtctttcataatcttgacatttttgagcagtactgactagtcatagaacatccttctaatatttcttcatggttgaatttagattatgcattttttgcaagaataccataaaggtgatgcttgtgcccttctcagtgcatcatatcaggaggcacacgatactgatttgttgcattactaatggtattaacttcaatcatttggttaaggtgctgtcttccatgtttctcaatattttcccctttgtaattaacagtatcttgtgggaaaagcctttgaggttatgtaaatagcccatttctcatcaaactttttctcacaaactttagcatccattgatgattcttgcctgcaacaattattactgtggtgcttgccaaatgttgactttctatttctaccatttccattattctttttatattaattaattattattctgcttaagcaaagaattttccccttcctcccatttatacattctaattctatatcatcatagactcattgatatttgttttatattatcttataagatatcatccattattgttacttatttttttactcaaattgtcccagatatggtcattgagagtcacttcaggttagtttttgtgcatttcatgatatcttctcaatttttttgtgtacttccttactttttggcaccacaaaaatgattcaggttcagcatatactcttcttatccctgctctacaatcaatcagccacttgtccagagaaccctgataaattttactggagaatcatatttagatataaagatccgggttcaaggtgcttattactttcaggctcaagagatgaactttgaattcaaatatacagataaattgaagataaaggtatggaaaaaataatcaggtatacagtaagtataagtggctataataatatcagacaaattagatttcatgatgatgagtattaccacaaataaaaagaaacatttcataataataaagagatcaattcataaaatattactataagtcaataatatgaatcaataataaacagaaaaactgtcccattaaaatgggcataagacttgaacagatatttcaaacaagaagataaataaatggtaaatattatatgaaaatatgcttatcactattaatcatcagggaaatgcaaattaaaatcacaatgcagtactacttcaaaccccctggaatagctaaaataaaaaaagtccggacgcgtgg

SEQ ID NO: 2680 - DNA, 523 bp, Homo sapiens
acaatatacaatagggctaatatgtttttaaacttaatatgaatggtatcatactgtacaattggttttgtagtttgcttttgtcactcaatattatgttgatgagatttattgggctgctatttaaagcagttttcttagcacagaggccctgtttgcttgccaaactgcatgtctgctgggttgcgtctgtctttaaagggtgacttcctctaattaatccactggggtgaggggtaagttgaaccttttttctgttcacaagtgtggatacaagctaaaggtggccctgtgtggttccctcactacaaccatggtatagtagtccattgtagaaatataccacagttctattgatggacctgttgggttattctatatgttttgctgttaaaagtcatacttcactgaacattcttggacttgcactttgtgcacacctggaatattacataaaagtggagttgccagggtgcatataccaaattgcttaacaggctgggtgtagtggctcacacctgta

SEQ ID NO: 2681 - DNA, 851 bp, Homo sapiens
  misc_feature (50)..(50): n equals a,t,g, or c
  misc_feature (718)..(718): n equals a,t,g, or c
  misc_feature (738)..(738): n equals a,t,g, or c
  misc_feature (796)..(796): n equals a,t,g, or c
  misc_feature (810)..(810): n equals a,t,g, or c
ttacccctcactaaagggaacaaaagctggagctccaccgcggtggcggncgctctagaactagtggatcccccgggctgcaggaattcggcacgagcctgtccgcagcgtgcacagcccaggagtgttgagcaatttcggtttcctctgaggttgaaggacccaggcgtgtcagccctgctccagacaccttgggcatggaggagagtgtcgtacggccctcagtgtttgtggtggatggacagaccgacatcccattcacgaggctgggacgaagccaccggagacagtcgtgcagtgtggcccgggtgggtctgggtctcttgctgttgctgatgggggccgggctggccgtccaaggctggttcctcctgcagctgcactggcgtctaggagagatggtcacccgcctgcctgacggacctgcaggctcctgggagcagctgatacaagagcgaaggtctcacgaggtcaacccagcagcgcatctcacagttacaacatttggaggccacagcgagatccgccaccgggtgaaatctggacccgttccgggctcccctggacagacggcgagcttataggggaggcgccacctaaagacgttccagggacgtgtaggccaccgtctttcagaggggaacggatcggctgccggtgtcctcaaccaaattcaactcctgagtcctcagtgtctggtcccgggaaggacgtgtgnttgcaatcaccacctggaangcggggaccttccaaggaagtctctttttgcagtccgaatttaatgggcttttggttnccaagaaccctggncctttaccccgtggaaagagccaaccgcaaattctgggccg

SEQ ID NO: 2682 - DNA, 622 bp, Homo sapiens; identical to SEQ ID NO: 373

SEQ ID NO: 2683 - DNA, 1183 bp, Homo sapiens
  misc_feature (8)..(8): n equals a,t,g, or c
  misc_feature (19)..(19): n equals a,t,g, or c
  misc_feature (21)..(21): n equals a,t,g, or c
  misc_feature (31)..(31): n equals a,t,g, or c
gacactcntcaaactcctnangggaacaaancctggagctccaccgcggtggcggccgctctagaactagtggatcccccgggctgcaggaattccccgggaggatgtgcgtgggggctcggcggctgggccgcgggccgtgtgcggctctgctcctcctgggcctggggctgagcaccgtgacggggctccactgtgtcggggacacctaccccagcaacgaccggtgctgccacgagtgcaggccaggcaacgggatggtgagccgctgcagccgctcccagaacacggtgtgccgtccgtgcgggccgggcttctacaacgacgtggtcagctccaagccgtgcaagccctgcacgtggtgtaacctcagaagtgggagtgagcggaagcagctgtgcacggccacacaggacacagtctgccgctgccgggcgggcacccagcccctggacagctacaagcctggagttgactgtgccccctgccctccagggcacttctccccaggcgacaaccaggcctgcaagccctggaccaactgcaccttggctgggaagcacaccctgcagccggccagcaatagctcggacgcaatctgtgaggacagggaccccccagccacgcagccccaggagacccagggccccccggccaggcccatcactgtccagcccactgaagcctggcccagaacctcacagggaccctccacccggcccgtggaggtccccgggggccgtgcggttgccgccatcctgggcctgggcctggtgctggggctgctgggccccctggccatcctgctggccctgtacctgctccggagggaccagaggctgccccccgatgcccacaagccccctgggggaggcagtttccggacccccatccaagaggagcaggccgacgcccactccaccctggccaagatctgacctgggcccaccaaggtggacgctgggccccgccaggctggagcccggagggtctgctgggcgagcagggcaggtgcaggccgcctgccccgccacgctcctgggccaactctgcaccgttctaggtgccgatggctgcctccggctctctgcttacgtatgccatgcatacctcctgccccgcgggaccacaataaaaaccttggcagacgggagtctccgaccggcaaaaaaaaaaaaaaaaa

SEQ ID NO: 2684 - DNA, 1135 bp, Homo sapiens
gggaggatgtgcgtgggggctcggcggctgggccgcgggccgtgtgcggctctgctcctcctgggcctggggctgagcaccgtgacggggctccactgtgtcggggacacctaccccagcaacgaccggtgctgccacgagtgcaggccaggcaacgggatggtgagccgctgcagccgctcccagaacacggtgtgccgtccgtgcgggccgggcttctacaacgacgtggtcagctccaagccgtgcaagccctgcacgtggtgtaacctcagaagtgggagtgagcggaagcagctgtgcacggccacacaggacacagtctgccgctgccgggcgggcacccagcccctggacagctacaagcctggagttgactgtgccccctgccctccagggcacttctccccaggcgacaaccaggcctgcaagccctggaccaactgcaccttggctgggaagcacaccctgcagccggccagcaatagctcggacgcaatctgtgaggacagggaccccccagccacgcagccccaggaaacccagggccccccggccaggcccatcactgtccagcccactgaagcctggcccagaacctcacagggaccctccacccggcccgtggaggtccccgggggccgtgcggttgccgccatcctgggcctgggcctggtgctggggctgctgggccccctggccatcctgctggccctgtacctgctccggagggaccagaggctgccccccgatgcccacaagccccctgggggaggcagtttccggacccccatccaagaggagcaggccgacgcccactccaccctggccaagatctgacctgggcccaccaaggtggacgctgggccccgccaggctggagcccggagggtctgctgggcgagcagggcaggtgcaggccgcctgccccgccacgctcctgggccaactctgcaccgttctaggtgccgatggctgcctccggctctctgcttacgtatgccatgcatacctcctgccccgcgggaccacaataaaaaccttggcagacgggagtctccgaccggcaaaaaaaaaaaaaaaaaaaaaaaaaaaaaaaaaaaaaaaaaaaaaaaaaaaaaaaaaaaaaaaaaaa

SEQ ID NO: 2685 - DNA, 920 bp, Homo sapiens; identical to SEQ ID NO: 1385

SEQ ID NO: 2686 - DNA, 1053 bp, Homo sapiens
  misc_feature (599)..(599): n equals a,t,g, or c
  misc_feature (881)..(881): n equals a,t,g, or c
accgcctgctggagctgagtgaggagctggtggagagctggtggtttcacaagcagcaggaggccccgacctcttcagtggctgtgctakattccctgaagctctgctgccccgcaggcaccttcgggccctcctgccttccctgtcctgggggaacagagaggccctgcggtggctacgggcagtgtgaaggagaagggacacgagggggcagcgggcactgtgactgccaagccggctacgggggtgaggcctgtggccagtgtggccttggctactttgaggcagaacgcaacgccagccatctggtatgttcggcttgttttggcccctgtgcccgatgctcaggacctgaggaatcaaactgtttgcaatgcaagaagggctgggccctgcatcacctcaagtgtgtagactgtgccaaggcctgcctaggctgcatgggggcagggccaggtcgctgtaagaagtgtagccctggctatcagcaggtgggctccaagtgtctcgatgtggatgagtgtgagacagaggtgtgtccgggagagaacaagcagtgtgaaaacaccgagggcggttatcgctgcatctgtgccganggctacaagcagatggaaggcatctgtgtgaaggascagatcccagagtcagcaggcttcttctcagagatgacmgaagacgagttggtggtgctgcagcagatgttctttggcatcatcatctgtgcactggccacgctggctgctaagggcgacttggtgttcaccgccatcttcattggggctgtggcggccatgactggctactggttgtcagagcgcagtgaccgtgtgctggagggcttcatcaagggcagataatcgcggccaccacctgtaggncctcctcccacccacgctgcccccagagcttgggctgccctcctgctggacactcaggacagcttggtttatttttgagagtggggtaagcacccctacctgccttacagagcagcccaggtacccaggcccgggcagacaaggcccctggggtaaaaagtagccgtgaagg

SEQ ID NO: 2687 - DNA, 1888 bp, Homo sapiens; identical to SEQ ID NO: 1386

SEQ ID NO: 2688 - DNA, 1652 bp, Homo sapiens
cccgggggcccccgaagggcctagtcccagctgtgctctggggcctcagcctcttcctcaacctcccaggacctatctggctccagccctctccacctccccagtcttctcccccgcctcagccccatccgtgtcatacctgccggggactggttgacagctttaacaagggcctggagagaaccatccgggacaactttggaggtggaaacactgcctgggaggaagagaatttgtccaaatacaaagacagtgagacccgcctggtagaggtgctggagggtgtgtgcagcaagtcagacttcgagtgccaccgcctgctggagctgagtgaggagctggtggagagctggtggtttcacaagcagcaggaggccccggacctcttccagtggctgtgctcagattccctgaagctctgctgccccgcaggcaccttcgggccctcctgccttccctgtcctgggggaacagagaggccctgcggtggctacgggcagtgtgaaggagaagggacacgagggggcagcgggcactgtgactgccaagccggctacgggggtgaggcctgtggccagtgtggccttggctactttgaggcagaacgcaacgccagccatctggtatgttcggcttgttttggcccctgtgcccgatgctcaggacctgaggaatcaaactgtttgcaatgcaagaagggctgggccctgcatcacctcaagtgtgtagactgtgccaaggcctgcctaggctgcatgggggcagggccaggtcgctgtaagaagtgtagccctggctatcagcaggtgggctccaagtgtctcgatgtggatgagtgtgagacagaggtgtgtccgggagagaacaagcagtgtgaaaacaccgagggcggttatcgctgcatctgtgccgagggctacaagcagatggaaggcatctgtgtgaaggagcagatcccagagtcagcaggcttcttctcagagatgacagaagacgagttggtggtgctgcagcagatgttctttggcatcatcatctgtgcactggccacgctggctgctaagggcgacttggtgttcaccgccatcttcattggggctgtggcggccatgactggctactggttgtcagagcgcagtgaccgtgtgctggagggcttcatcaagggcagataatcgcggccaccacctgtaggacctcctcccacccacgctgcccccagagcttgggctgccctcctgctggacactcaggacagcttggtttatttttgagagtggggtaagcacccctacctgccttacagagcagcccaggtacccaggcccgggcagacaaggcccctggggtaaaaagtagccctgaaggtggataccatgagctcttcacctggcggggactggcaggcttcacaatgtgtgaatttcaaaagtttttccttaatggtggctgctagagctttggcccctgcttaggattaggtggtcctcacaggggtggggccatcacagctccctcctgccagctgcatgctgccagttcctgttctgtgttcaccacatccccacaccccattgccacttatttattcatctcaggaaataaagaaaggtcttggaaagttaaaaaaaaaaaaaaaaaaaaaaaaaaaa

SEQ ID NO: 2689 - DNA, 1749 bp, Homo sapiens
  misc_feature (1625)..(1625): n equals a,t,g, or c
  misc_feature (1642)..(1642): n equals a,t,g, or c
  misc_feature (1645)..(1645): n equals a,t,g, or c
gcacagcacgtacacccactccagggatctgccagcaccctgtggggcccagactacaggctgatggcggaggcttcgagtgacccgggtgccgaggagcgggaagagttgctggggcccactgctcagtggagcgtggaggacgaggaggaggccgtccacgagcaatgccagcatgagagagacaggcagcttcaggcccaggacgaggagggaggcggccatgtccccgagcggccgaagcaggagatgctcctcagcctgaagccctcggaggcccctgaactggatgaggacgagggctttggcgactggtcccagaggccagagcagcggcagcagcacgagggggcgcagggcrccttggacagcggagagcccccccagtgcaggagtcctgagggggagcaagaggacaggcccggcctgcatgcctacgaaaaggaggacagtgatgaagtccacctggaggagttgagtctgagcaaggaggggccaggcccagaggacactgtccaggacaacctgggggccgcaggggctgaggaggaacaggaggagcaccagaaatgtcagcagcccaggacacccagccccttggtcttggaggggaccatcgaacagagctcgcctcccctgagccctaccaccaaactcatcgacaggaccgagtccctaaaccgctccatagagaagagtaacagtgtgaagaaatcccagccagacttgcccatctccaagattgatcagtggctggaacaatacacccaggccatcgagaccgctggccggacccccaagctagcccgccaggcctccatagagctgcccagcatggctgtggccagtaccaagagtcggtgggagacgggtgaggtacaggctcagtctgcggccaagactccgtcctgcaaggatattgtggctggagacatgagcaagaaaagcctctgggagcagaagggaggctccaagacctcatcaacaattaagagcaccccatctgggaagaggtataagtttgtggccaccgggcatgggaagtatgagaaggtgcttgtggaagggggcccggctccctaggcgtcccatctcgcttcctgggtctgcaggtccagccggctggcaccctccatgtacccaggggagattccagccagacacccgccccccggccctggctaagaagttgcttcctgttgccagcatgacctaccctcgcctctttgatgccatccgctgccacctccttttgctcctggaccctttagcctctctgcccttccactctctgaccaccgcccccgccctccccacccagctccgcttcttgttacttgggggaggaaagaaactcctgatcattggccaaagggacttacccctggagaggccaagtgccttctaggaagttaggaggttgaggcacagcctgtgcagagagggtgggtcacccccccagatccaaggggaaactgcaggtcaagggctgataacggccatgcaggatgcttgatgctgcgtcccccgctgcttgccgccccccaccccgccattttgtataataaagctccctgtgtattctcaaaaaaaaaaaaaaaaaaaggatcctcgaggtcgacggnccaaaaaaaaaaaaaanggntccctcgagggggggcccggtacccaatttgccctatagtggtgtttaaattactggccgtggtttaaacgtgtgctggaaccctggggttcccacttatgctt

SEQ ID NO: 2690 - DNA, 816 bp, Homo sapiens
ggcacgagccatgcccgtcctctaaagacggtttgaaacccactatatttgtaagcaatgaaaattttatgaacatagtaggtgtggagtgcttttcacagagtctcttgggtcttacctacactagggagaaataactttcaaatgtcttcaaagtgagattaaatctcacatgcacctagattggtttgttttacttgggtgtagtctgctcagtttttcatcttgcgttatggttaattgtgtgaagttatgcttcccactaaattatgaaccttgaaagcagtaacatctctttcttttcgtgacaccatctcacactctaccctccctcccttccttcctttcacctccatatctctgcacaggcatagtgcccgaaaatggtaagcattggtggatggtgatgtgaatctgtcatctaattgcggaccttgaagaggaggcacagctcaaaagaaataactgtgtggatgaatttggctattttctttaggaaacaaagagccaggccgggcacggtggctcacgcctgtggtcccagcactttgggaggccgagatgggcagatcacgaggtcgggagatcgagaccatcctggctaacacggtgaaatcccgtctctactaaaaatacaaaaaaattggccgggcatggtggcagtcacctgtggtcccggctactcaggaggctgaggcaggaggatagcgtgaacctggaaggcggagcttgtagtgggccgagatcgtgccactgcactccagcctgggcgacagagtgagactctgtctcaaaaaaaaaaaaaaaaaaaaaaaa

SEQ ID NO: 2691 - DNA, 504 bp, Homo sapiens
  misc_feature (15)..(15): n equals a,t,g, or c
  misc_feature (28)..(28): n equals a,t,g, or c
  misc_feature (54)..(54): n equals a,t,g, or c
cggggctgccagganttcggcacgagcnatgcccgtccttctaaagacggtttngaaccccttawatttgtaagcaatgaaattttatgamcwtagtaggtgtggagtgcttttcacagagtctcttgggtcttacctacactagggagaatactttcaaatgtcttcaaagtgagattaaatctcacatgcacctagattggtttgttttacttgggtgtagtctgctcagtttttcatcttgcgttatggttaattgtgtgaagttatgcttcccactaaattatgaaccttgaaagcagtaacatctctttcttttcgtgacaccatctcacactctaccctccctcccttccttcctttcacctccatatctctgcacaggcatagtgcccgaaaatggtaagcattggtggatggtgatgtgaatctgtcatctaattgcggaccttgaagaggaggcacagctcaaaagaaataactgtgtggatgaatttggctatt

SEQ ID NO: 2692 - DNA, 1653 bp, Homo sapiens
gcggccgcggcaccggaagtgccccccacgggaggctgccctcggggtcgcaggccgcatggccaagcgtggaccggggccgcatggcagcgcggggacccctccccccaggtcccggccaccggaagcccggaacgccacatggtcggcaggagccggcagcccctagcgcggggagctagtcctcgcgggggttccgagggggcctgagattttgaggagtggaagccggaggctcgggtcctaatcaccccggagggcctgctgcaggcatatgttagcgcttcccaacctcaagggccccaggagctttcctgaaaaaccctcctgtgaagtgtggcggtcagccaggtttggaatcgaagcctcttaaaatggcagatgacttggacttcgagacaggagatgcaggggcctcagccaccttcccaatgcagtgctcagcattacgtaagaatggctttgtggtgctcaaaggccggccatgtaagatcgtcgagatgtctacttcgaagactggcaagcacggccacgccaaggtccatctggttggtattgacatctttactgggaagaaatatgaagatatctgcccgtcaactcataatatggatgtccccaacatcaaaaggaatgacttccagctgattggcatccaggatgggtacctatcactgctccaggacagcggggaggtacgagaggaccttcgtctccctgagggagaccttggcaaggagattgagcagaagtacgactgtggagaagagatcctgatcacggtgctgtctgccatgacagaggaggcagctgttgcaatcaaggccatggcaaaataactggctcccagggtggcggtggtggcagcagtgatcctctgaacctgcagaggccccctccccgagcctggcctggctctggcccggtcctaagctggactcctcctacacaatttatttgacgttttattttggttttccccaccccctcaatctgtcggggagcccctgcccttcacctagctcccttggccaggagcgagcgaagctgtggccttggtgaagctgccctcctcttctcccctcacactacagccctggtgggggagaagggggtgggtgctgcttgtggtttagtcttttttttttttttttttttaattcaatctggaatcagaaagcggtggattctggcaaatggtccttgtgccctccccactcatccctggtctggtcccctgttgccyatagccctttaccctgagcaccaccccaacagactggggaccagccccctcgcctgcctgtgtctctccccaaacccctttagatggggagggaagaggaggagaggggaggggacctgccccctcctcaggcatctgggagggccctgcccccatgggctttacccttccctgcgggctctctccccgacacatttgttaaaatcaaacctgaataaaactacaagtttaatatgaaaaaaaaaaaaaaaaaaaaaaaaraaagacgtgtaaaatgccaagaactctaggaaacagggacaaaaacacttcaaagagaaagttcatgcacttgtttctgaccacccagggcacccttcagcacacgctgtctggagtggcctgaagcaaggagtgtcttggtcgac

SEQ ID NO: 2693 - DNA, 1584 bp, Homo sapiens
aattcggcacgagggcatggggcggctggttctgctgtggggagctgccgtctttctgctgggaggctggatggctttggggcaaggaggagcagcagaaggagtacagattcaratcatctacttcaatttagaaaccgtgcaggtgacatggaatgccagcaaatactccaggaccaacctgactttccactacagattcaacggtgatgaggcctatgaccagtgcaccaactaccttctccaggaaggtcacacttcggggtgcctcctagacgcagagcagcgagacgacattctctatttctccatcaggaatgggacgcaccccgttttcaccgcaagtcgctggatggtttattacctgaaacccagttccccgaagcacgtgagattttcgtggcatcaggatgcagtgacggtgacgtgttctgacctgtcctacggggatctcctctatgaggttcagtaccggagccccttcgacaccgagtggcagtccaaacaggaaaatacctgcaacgtcaccatagaaggcttggatgccgagaagtgttactctttctgggtcagggtgaaggctatggaggatgtatatgggccagacacatacccaagcgactggtcagaggtgacatgctggcagagaggcgagattcgggatgcctgtgcagagacaccaacgcctcccaaaccaaagctgtccaaatttattttaatttccagcctggccatccttctgatggtgtctctcctccttctgtctttatggaaattatggagagtgaagaagtttctcattcccagcgtgccagacccgaaatccatcttccccgggctctttgakatacaccaagggaacttccaggagtggatcacagacacccagaacgtggcccacctccacaagatggcaggtgcagagcaagaaagtggccccgaggagcccctggtagtccagttggccaagactgaagccgagtctcccaggatgctggacccacagaccgaggagaaagaggcctctgggggatccctccagcttccccaccagcccctccaaggcggtgatgtggtcacaatcgggggcttcacctttgtgatgaatgaccgctcctacgtggcgttgtgatggacacaccactgtcaaagtcaacgtcaggatccacgttgacatttaaagacagaggggactgtcccggggactccacaccaccatggatgggaagtctccacgccaatgatggtaggactaggagactctgaagacccagcctcaccgcctaatgcggccactgccctgctaactttcccccacatgagtctctgtgttcaaaggcttgatggcagatgggagccaattgctccaggagatttactcccagttccttttcgtgcctgaacgttgtcacataaaccccaaggcagcacgtccaaaatgctgtaaaaccatcttcccactctgtgagtccccagttccgtccatgtaccattcccatagcattggattctcggaggattttttgtctgttttgagactccaaaccacctctacccctacaaaaaaaaaaaaaaaaaactcga

SEQ ID NO: 2694 - DNA, 1564 bp, Homo sapiens
gacacgagctgagctgctgctcagtcaggtttcccaaaaggtaagaagaaatgaggcagacctgaatctgctgaaacaccatttgctaacattcttccttcagacaggttaaagaaatagattacttgagtgtctgtgtcatgggttcccaacaggaagtggttctgctgcccccatagtccctgacatttggcaatgtctggagacattttaggttcatgtttttggtgctgctggtatccagtgggtaggagccagggtgctgccaaatatcctacaatgcacaggcagccccctgcaacaaagaagtatccatcctaaaccctgctctatgtgtatcccatggaactctttcttcataccttgtttacataaatgtcaaaagtttgttcaggtttttgagcgtgattcctccttctttgggaatcactgcacttcatacatcattttgtcaagaacggtgagttttccctagggctttatgccactgggccttggtggtatacctgtccaccttctccaggtgttctgtgggtggtcagtttgatggactgcatttgtgctgtcccctttgcaaagcacagttctgaagtgtgtttctgtctatttttgttgtccttgggtaccatcctccccacctgccattatgtcagggactgtgaacccatgggactggtttattttgccttaacattgaaatagtgtgctcctagctgattccctgtttaatgacgtctatgtgctagttttatgtcgtcggatttttcactttgctcatgttttttggttagctctcaaacagtgagtcggtccagcagcagatggagttcttgaacaggcagctgttggttcttggggaggtcaacgagctctatttggaacaactgcagaacaagcactcagataccacaaaggaagtagaaatgatgaaagccgcctatcggaaagagctagaaaaaaacagaagccatgttctccagcagactcagaggcttgatacctcccaaaaacggattttggaactggaatctcacctggccaagaaagaccaccttcttttggaacagaagaaatatctagaggatgtcaaactccaggcaagaggacagctgcaggccgcagagagcaggtatgaggctcagaaaaggataacccaggtgtttgaattggagatcttagatttatatggcaggttggagaaagatggcctcctgaaaaaacttgaagaagaaaaagcagaagcagctgaagcagcagaagaaaggcttgactgttgtaatgacgggtgctcagattccatggtagggcacaatgaagaggcatctggccacaacggtgagaccaagacccccaggcccagcagcgcccggggcagtagtggaagcagaggtggtggaggcagcagcagcagcagcagcgagctttctaccccagagaaacccccacaccagagggcaggcccattcagcagtcggtgggagacgactatgggagaagcgtctgccagcatccccaccactgtgggctcacttcccagttcaaaaagcttcctgggtatgaaggc

SEQ ID NO: 2695 - DNA, 817 bp, Homo sapiens
  misc_feature (131)..(131): n equals a,t,g, or c
  misc_feature (799)..(799): n equals a,t,g, or c
ggacattttgtattgactccatatgtataagatacagaaattcttagctctgtattgctttttgcctcttttctaccatctattttcccacttctgttaactctagcattacttttactataatttaattntaattcactatgttctgcttatcccagaagaaattcaagagggcttatacatatataaaacaggttctgagttgattaatatcatagtttaaaaaacttttaaggatgaattcttaagataaatgtgtggagaaggaataaaaagagtttattttcttagtgtacactcttatcctcctctgcgcaacttgacccttctaaattgtatcttgaagatacctctgatgtccttgggaacttttattttccaacctgtatacccagycatacctgaatttcattaaggtgtactgttttgcatatattcttgattstaggatgccttcaactgtaagacccattattgctttaaaataatgttattggttgggaggggattgcattaaatgattagtccaattaattaataaagtgagaaaacatttatagtttcttatatagaggggaaaataggcaaaaataaaaattaagtcactgttaattctgttgtccgcctttattttctttatccaaataaaactttttttttctttaaaaaaaaaaaaaaaragctgggtacagtggcccacatctgtagtcccagctgctttggaggctgaggtcagaggatcccttgagcccaggagttacaagccaccctgggcaacatactgagaccctctctcttnctttaaaaaaaaaaaaaa

SEQ ID NO: 2696 - DNA, 444 bp, Homo sapiens
actccagcctgagtgacagagcaaggccctgtctcaaaggaaaaaaaaaaaagatgactacagtttctttttattgtggtaaaatgtacgtaacaaaacttaataatttttcagtgtacagttcagtggcattaagtacattcacattgttaaccatcaccactatctatctgcagaactttttcatcatcccaaactgaatgtgtactcataaaagagtggcagctcttcaatttttcttttcttttcttctgcttcagataaccaccattctactttgtctgtctagaaacttgactattgcaggtacctcatatgagtggaatcatgtagtatttgtccttttttgtctgggktatttcagtaagcataaaatcttcaagrttcatttatgaagcatgtgatagaattccccttatttttaaggctgaatagtattccgtt

SEQ ID NO: 2697 - DNA, 674 bp, Homo sapiens
ggcacgagctcgtgccgattcggcacgagcggcacgagtttttttatgactacataatgtttattgcgatctattttaaggcttttcatggatcttttcagctatgcacatggttagtcataatgattgtcattttaggtcagagtttctcagccttagcattgttgacattttggttaattctttgttgtaggggctgtcctgtacactgtagggtgtttagcagcatccctgatctctacctactaaatgccaggagcaacacagtacctccagctcagttgtgacaactactgaatgtctccagacaactactgaatgtctccagacattgcagagaaattgagtctggttgagaagtcactgttttagggcataatttttgggtagactgttagattctttgtgttcgttgtctctggcctgtataactcttcttaattatctgctactcaaatgtatttgggatcagccactgtcttccatttctcttttgctcacagatctactccacagctcttctcccttcaaacactgttcctcagcatcttgttttttgcagccaaacatttcttggagatctttccattggatcagtgttctgaactgcctgcgccggggccgggcgggggccgggccggggccgctgtagtgccgcgctgcgagcggcacga

SEQ ID NO: 2698 - DNA, 1508 bp, Homo sapiens
  misc_feature (39)..(39): n equals a,t,g, or c
  misc_feature (1398)..(1398): n equals a,t,g, or c
  misc_feature (1430)..(1430): n equals a,t,g, or c
  misc_feature (1445)..(1445): n equals a,t,g, or c
  misc_feature (1498)..(1498): n equals a,t,g, or c
gaggaagcgaagagcgcccaatacgcaaaccgcctctcnccgcgcgttggccgattcattaatgcagctggcacgtcaggtttcccgactggaaagcgggcagtgagcgcaacgcaattaatgtgagttagctcactcattaggcacctcaggctttacactttatgcttccggctcgtatgttgtgtggaattgtgagcggataacaatttcacacaggaaacagctatgaccatgattacgccaagctcgaaattaaccctcactaaagggaacaaaagctggagctccaccgcggtggcggccgctctagaactagtggatcccccgggctgcaggaattcggcacgagctcgtgccgattcggcacgagcggcacgagtttttttatgactacataatgtttattgcgatctattttaaggcttttcatggatcttttcagctatgcacatggttagtcataatgattgtcattttaggtcagagtttctcagccttagcattgttgacattttggttaattctttgttgtaggggctgtcctgtacactgtagggtgtttagcagcatccctgatctctacctactaaatgccaggagcaacacagtacctccagctcagttgtgacaactactgaatgtctccagacaactactgaatgtctccagacattgcagagaaattgagtctggttgagaagtcactgttttagggcataatttttgggtagactgttagattctttgtgttcgttgtctctggcctgtataactcttcttaattatctgctactcaaatgtatttgggatcagccactgtcttccatttctcttttgctcacagatctactccacagctcttctcccttcaaacactgttcctcagcatcttgttttttgcagccaaacatttcttggagatctttccattggatcagtgttctgaactgcctgcgccggggccgggcgggggccgggccggggccgctgtagtgccgcgctgcgagcggcacgagggggggcccggtacccaattcgccctatagtgagtcgtattacaattcactggccgtcgttttacaacgtcgtgactgggaaaaccctggcgttacccaacttaatcgccttgcagcacatccccctttcgccagctggcgtaatagcgaagaggcccgcaccgatcgcccttccaacagttgcgcagcctgaatggcgaatggcaaattgtaagcgttaatattttgttaaaattcgcgktaaatttttggtaaatcagytcattttttaaccaataggccgaaatcggcaaaatcccttataaatcaaaagaatagaccgagatagggttgagtggtggtccagtttggaccaagaagtccactattaaaggaccgngggacttcacgtcaaagggcgaaaaaaccgtntatcagggcgatggnccacttacgtggaacccattaacccttaatcaaaggtttttttggggggtccnaaggtggccc

SEQ ID NO: 2699 - DNA, 1285 bp, Homo sapiens; identical to SEQ ID NO: 1944
  misc_feature (1213)..(1213): n equals a,t,g, or c
  misc_feature (1217)..(1217): n equals a,t,g, or c
  misc_feature (1252)..(1252): n equals a,t,g, or c
  misc_feature (1270)..(1270): n equals a,t,g, or c
  misc_feature (1272)..(1272): n equals a,t,g, or c
  misc_feature (1275)..(1275): n equals a,t,g, or c
  misc_feature (1278)..(1278): n equals a,t,g, or c

SEQ ID NO: 2700 - DNA, 2196 bp, Homo sapiens
attgctcccccaccctggccgcatgctaacattcatggaggcagacatgtgtacccagaatcagagggagccggttatcctcagttggagatcccaaaagacttctgcatacagttcctttcgttggatggcacaagaaagctcagagcccatgggagatttaatttattatcatataagactccttggaatgaatatatgtgttatctttccaaatgaccttactttattctacttatgtatacaatttctctgtcataatgtcttattttgtttttctttttcaattgtggaagaaggcagatcatcaaagttgttatgaataagtgtttagaagtacaatcaagcctgcaagtagttattaaggtctaatattgcaaatgctgaggtgacatgagacaaaggaggcaagatttctgatctaaagatacttgtattctggctgggtggagaagccataaactcctaaggaattagctcaaagtaagtcaacatgtgcatacatctgttgcaccaaaatgaaagcccaaccctgactttaatgacattcagtttctagaaaaacactattatagcaccaatcagaaaagccaagtaactaaatcttttaattttctgggcacactaagacttaagtagtctgaggatatcagggtggaaataaatgtagaaaaagttattgtgattccatggtagtggaaactcccatacacttctctttccctttctctttctcttttcctctcttctctttcttgattcctctgtctctctatcattggctttccccttgctaccctggcagacctgattgacaggtgtgacaattcccatggcaagctaatcccaccaggctggcagcttttgaaatttctatgtaaatacagtatttgtctaagtaccacacttaaatacagtagttaacgtttaagcacccacaggttggttctctttgtacttgaatcaacaaccattttcagctcttagaagggaccacccacaaaactgtactttttgactgtagaaaaactcagggagaaacaaataaaatgaagcaaaaagttgagagaaaaaaaaccccaaaaaccacaaaactaaattatcgctaaattatcgacccaaggaggcatggttaggctaaggccaaaaactctgaattaaacttccaaatctaaccagctacctctagatgtaaacctgattttcatcttttctatcacccacatagacatgacttttttttccagacatcttgattacagttaatgttaaaatagcttcaagtctaaaatgcagatgtgttgtcttgaactgaaacgaactatcaaacagacaatgataaataatgatcatttaaacttggccttttaaaaagcacattggatacaataaaaatcagtgtattagtacactaaatgtgcttccaattatgatataaatagtgcataaagctttaaaattttcatcaaattaatgtatcactgacatgcaaattaactactgacatctatggtgtatgccatgtgatgatttctaattggcaagtgaacctcagaggattatttatagattacactgcaacaaagtgctggagtaaattcgcattgtgcagctcaattcaaattggtgtttgagctttgattctcttcactttttcacaccccttttgatctcaaagggctctcagaaataagctagctaaggtgctaaatatctaattaataacatttgggcagagaatttgtcttcaaatgacccctaagagatttggagaccagttaatatccctcactagcttgttcaggtatgaataactcttgaggctgttgagtttgaactccaagatttggtaacatccatttccatccaaagcacgtaagagaaatgttcacacaggaaaagtgaggaggaaacttgaaaatttaccaagtgtattaatttttaagaacagctgcttctaaggatctaagtggaaatcctgtattattctctaatggcaattgaggcttcttttatctttactttccattacaatttgtgtatgaagaatgcagtgagagaattacaatgtatctgcaattcccatactatgttattagctccaagtttggcctttctttattccatgtccgtgtctccctaaaggtagaatgaccaaataaaaaaatgaagaagtaaaaaaaaaaaaaaaaaaaa

SEQ ID NO: 2701 - DNA, 2304 bp, Homo sapiens
  misc_feature (2165)..(2165): n equals a,t,g, or c
  misc_feature (2226)..(2226): n equals a,t,g, or c
  misc_feature (2286)..(2286): n equals a,t,g, or c
ggccgcccaccggggtacgctctcccgcgcctgcgcaattccgccccgccccgtccccatctaccgaccggatgttagcagatttcccatagtgcctcgctagtggcgggcatgataacacacgccggagggtcgcacgcgggttccagttgtgattgctggagttgtgtattgccaggaggctctccgagattggggtcgggtcactgcctcatccaccggagcgatggcgtttctccgaagcatgtggggcgtgctgagtgccctgggaaggtctggagcagagctgtgcaccggctgtggaagtcgactgcgctcccccttcagttttgtgtatttaccgaggtggttttcatctgtcttggcaagttgtccaaagaaacctgtaagttcttaccttcgattttctaaagaacaactacccatatttaaagctcagaacccagatgcaaaaactacagaactaattagaagaattgcccagcgttggagggaacttcctgattcaaagaaaaaaatatatcaagatgcttatagggcggagtggcaggtatataaagaagagataagcagatttaaagaacagctaactccaagtcagattatgtctttggaaaaagaaatcatggacaaacatttaaaaaggaaagctatgacaaaaaaaaaagagttaacactgcttggaaaaccaaaaagacctcgttcagcttataacgtttatgtagctgaaagattccaagaagctaagggtgattcaccgcaggaaaagctgaagactgtaaaggaaaactggaaaaatctgtctgactctgaaaaggaattatatattcagcatgctaaagaggacgaaactcgttatcataatgaaatgaagtcttgggaagaacaaatgattgaagttggacgaaaggatcttctacgtcgcacaataaagaaacaacgaaaatatggtgctgaggagtgttaaaagtagaagattgagatgtgttcacaatggataggcacaggaaaccagttaggtctcaatacctgaagctatcgtaaaattaagaaaggataaagttggtaaaccttttatatttagtatctttttattcagctcatggacttctgccagcataatacttgctttggaaaacccagataaaggttcatgcaaactttattttgtgtttaggaactactgaggatcagagtaatccaagcaaatgtgaatcattttacctttgacaaaggtaaatcagactatgaagttttttttatacaggatgatgactatggaaagagtactcttgtttccttatattatggaggcaggagtttcgttttcaaaattgttacaaattgtagaagccacggtgttctgtgatataagtgtgtgtttttcataaagcaggcagaactcatctaggtaaattacagttcctaggtataattcacattgtattcagagttgatggttgtacatataagtgattgctggttttagttgcaactttgtataaaagggactgagaaatttataaacttttttcttactgtcttttttctaaagtaaaaacaaagaaattatgtgccagatttatgcatattattttatgttgcatagaataaaatttttaatctttaattttacatttcctaaatatattttaagacgaaacatttgttctatagcttttccctttttttaagtaaggaattttatttttttctgaattattttctctcgtgagtatattgatccagaaagaaaacttgtattatgtgtgttttaaaatgagaaatctaaaaaacgaaaagtctccaaagtctctggaatttgaaacactttgcataacgtataaaagcctgtttaagagacagccaactatggcctgtggatcaaatccagcctgctgcctgctttttatggcctgtgagctaggaattgtgtttataattttaaatgtttttttttaaagacttttatgatacttgaaaattaacatgaatatttagtgttcataaataaagtttgttgaaacacaaccaarawcattcttttacttgtctatggctgcttttctgtggcagagtagctgccacagaaactatagcccacaaagcctgatatttactgtctgtctgtttatggaaaaaatttatcaacccatggtctatantatagtgtgatatgactactgttccaatgtattgaagtgttgggatagttttttcaaatgntttcagatgttcttgttttagaatcattgtcacctttaagaggaaaaaggtcatcactanataatctaaacaaattgc

SEQ ID NO: 2702 - DNA, 765 bp, Homo sapiens
ggcacttataaatgcctgctattgttaagccattccagcctcttcctctgaatagaccagacgccctttcacttagttcagtgccagtccttttgccttcccaaccctgctgttaggcctgctgttccctttgctcttgattaggagagatggaaggagatgagctcccataactgaattggcctttggttcatgttttctccccatatgtatatatgccatatgtgaatatgccatatatatgtgccaacaaatctatctacgttgttcttttcaaattagcacgcagataggaattttgagtttcttcttcttttagtaactagtataacaagcactggtatttttgtacaaaaaagaaaaacaaaagattgactattgtggtctgcatgacataaacaaacaaatggtgatatcaaagcaacgtataccccagtccagtgtgtgttgccataatttgcaattcagcttaacagtgcacccaatctatatttgcattttgatattatttaagctctatgtacaaggttttgcatgtatttatatggttcttagggaaaaaaaatgctataaactgcaaatctgaaattcaaatgtgttgttccactgagaccagaagaagaagaggagttttaaaagggataatttgttggagccaataaagctttttgctgatgaacagaaaccaatactgctgtgcactgagaataaaaactcatgcccacttgtaaaaaaaaaaaaaaaaaaagatctttaattaaagcg

SEQ ID NO: 2703 - DNA, 2329 bp, Homo sapiens
  misc_feature (1622)..(1622): n equals a,t,g, or c
  misc_feature (1634)..(1634): n equals a,t,g, or c
ctacgagtttttttttttttttttttttcagttttttaagatttatttcaagtgttgtgcaaagagggcttatgcaattcttcagaccctatttattttatttatttatttatgtacattcttctggaaaggattactaaagccaaactaagaaaagtatgtaagtgatggattatcaggcgcccttgtttgaggtcagagtaaacagacagactcccgataggttggtttaaaagtagatacctagattgcctggaagcattcaactcagctttgtgggagcatttggtcaaacttccaagtcattgttttttttgtgtgtgttcattttgttacttttccagttcttcctttgttctgtttatgtgccaatgtgcacagagaagatcaacatccccattggcccatgcggcggcatgtgtctttcagtcaagagacgctgtgaacccgtcctgaaggaatttggatttgcctggccagagagtctgaactgcagcaaattcccaccacagaacgaccacaaccacatgtgcatggaagggccaggtgatgaagaggtgcccttacctcacaaaacccccatccagcctggggaagagtgtcactctgtgggaaccaattctgatcagtacatctgggtgaaaaggagcctgaactgtgtgctcaagtgtggctatgatgctggcttatacagccgctcagccaaggagttcactgatatctggatggctgtgtgggccagcctgtgtttcatctccactgccttcacagtactgaccttcctgatcgattcttctaggttttcctaccctgagcgccccatcatatttctcagtatgtgctataatatttatagcattgcttatattgtcaggctgactgtaggccgggaaaggatatcctgtgattttgaagaggcagcagaacctgttctcatccaagaaggacttaagaacacaggatgtgcaataattttcttgctgatgtacttttttggaatggccagctccatttggtgggttattctgacactcacttggtttttggcagcaggactcaaatggggtcatgaagccattgaaatgcacagctcttatttccacattgcagcctgggccatccccgcagtgaaaaccattgtcatcttgattatgagactggtggatgcagatgaactgactggcttgtgctatgttggaaaccaaaatctcgatgccctcaccgggttcgtggtggctcccctctttacttatttggtcattggaactttgttcattgctgcaggtttggtggccttgttcaaaattcggtcaaatcttcaaaaggatgggacaaagacagacaagttagaaagactgatggtcaagattggggtgttctcagtactgtacacagttcctgcaacgtgtgtgattgcctgktatttttatgaaatctccaactgggcactttttcggtattctgcagatgattccaacatggctgttgaaatgttgaaaawttttatgyctttgttggtgggcatcacttcaggcatgtggatttggtctgccaaaactcttyacacgtggcaraagtgttccaacagattggtgaattctggaaaggtaaagagagagaanagaggaaatggntgggtgaagcctggaaaaggcagtgagactgtggtataaggctagtcagcctccatgctttcttcattttgaaggggggaatgccagcattttggaggaaattctactaaaagttttaygcagtgaatctcagtttgaacaaactagcaacaattaagtgacccccgtcaacccactgcctcccaccccgaccccagcatcaaaaaaccaatgattttgctgcagactttggaatgatccaaaatggaaaagccagttagaggctttcaaagctgtgaaaaatcaaaacgttgatcactttagcaggttgcagcttggagcgtggaggtcctgcctagattccaggaagtccagggcgatactgttttcccctgcagggtgggatttgagctgtgagttggtaactagcagggagaaatattaacttttttaaccctttaccattttaaatactaactgggtctttcagatagcaaagcaatctataaacactggaaacgctgggttcagaaaagtgttacaagagttttatagtttggctgatgtaacataaacatcttctgtggtgcgctgtctgctgtttagaactttgtggactgcactcccaagaagtggtgttagaatctttcagtgcctttgtcataaaacagttatttgaacaaacaaaagtactgtactcacacacaaaaaaaaaa

SEQ ID NO: 2704 - DNA, 2776 bp, Homo sapiens; identical to SEQ ID NO: 1140

SEQ ID NO: 2705 - DNA, 1349 bp, Homo sapiens
gctcgtgccgcttttttcctgccatcggtcagaaaaaacatgtcgaagatggatggcattagattatgcaggaatttctattggaatactgggctgctatgtctcaggagtattttacgcattttattgtaataactactggcgtcaggtgtacttgatcacagtgcttgctatgatcctggcagtgttctttgcgcagattcatcccaattacctcacgcagcaatggcaaaggctccgttctatcatcttttgttctgtttcgggatatggagtgattcctactcttcactgggtttggctcaatggaggaattggtgctcctattgtacaggactttgcaccccgtgtaattgtgatgtatatgattgctcttcttgctttcctattctacatttccaaagtcccagagcggtactttccagaatcacttccacggtgaatcagagaagggattgtaccactcgtcacgtgtgttgggaaagaagaaagggtgagaaaccctggcctaaacaatccatcccacagatcctcaggcattcctttgtgtacttggtttttcaccactgagctttaaataagaatggaaatacaagggaaaacctgcgttgtaaacatgaggatttgggaacagatctaggacatgccactgaattgaagmccacccatcttccaggcaggsccagaattacmgaaaacaattctggacaactaactacctcggatcaagccaccaaatatggcatatccttgcagtagtgatgttatattggtggcatcagtcaacagtgtatgtcatgcagtacagacatagcaagccttgtcctgactatgtttcacatttgtgaattagaatcaggaacgaagattcagggaatgtctgtcacatcttatggcatcccacctggacagaatatccgatttgaagattgtgattgacttccgtaaaactgtacaactctccatttggcagctgctacataataggtgcttaatgtttgtggtgtgaatgaaataactgaatttgaatagaagtttacatccaaaagtcataataagacaaataatgaaaaactccaaagtcactgattataaagaatatgcaatccatttgggatttattgcatttaaagaaaacagattaaaacagtgcttwcgtgaagtwccaaaacctaaaataaaccaagcagagtagctgacttgtaagaaaactgctctgcctggtgaacttcagcatagaagagtgggctccmccttagattttccaccagcaagaggacaacagtctatcmctcttaaacaataaacagggtaagrctkaaaaaaaaaaaaaaaaaaaaaaaactcga

SEQ ID NO: 2706 - DNA, 811 bp, Homo sapiens; identical to SEQ ID NO: 674
  misc_feature (807)..(807): n equals a,t,g, or c

SEQ ID NO: 2707 - DNA, 650 bp, Homo sapiens
  misc_feature (559)..(559): n equals a,t,g, or c
  misc_feature (604)..(604): n equals a,t,g, or c
  misc_feature (621)..(621): n equals a,t,g, or c
  misc_feature (629)..(629): n equals a,t,g, or c
  misc_feature (641)..(641): n equals a,t,g, or c
agaagacgacagaaggggagccgctggggccgcgattccgcacgtcccttacccgcttcactagtcccggcattcttcgctgttttcctaactcgcccgcttgactagcgccctggaacagccatttgggtcgtggagtgcgagcacggccggccaatcgccgagtcagagggccaggaggggcgcggccattcgccgcccggcccctgctccgtggctggttttctccgcgggcgcctcgggcggaacctggagataatgggcagcacctgggggagccctggctgggtgcggctcgctctttgcctgacgggcttagtgctctcgctctacgcgctgcacgtgaaggcggcgcgcgcccgggaccgggattaccgcgcgctctgcgacgtgggcaccgccatcagctgttcgcgcgtcttctcctccagctattgttaggttgcctgcggacacgctgggcctctgtcctgatgctgctgagctccctggtgtctctcgctggttctgtctacctggcctggatcctgttcttcgtgctctatgatttctgcattgnttgtatcaccacctatgctatcaacgtgagcctgatgtggctcantttccggaaggtccaanaaccccanggcaaggctaanaagcactga

SEQ ID NO: 2708 - DNA, 717 bp, Homo sapiens
gagatcaacctcttcaaccactgggtgtcagggctggcccaggaggcccgggggtcctgtaactggcaggcccacctacccctgggagctgcagcctgccccctggsscaggctctccgggctgggctggctctgatacaggtccccgtatggctggtgctacagggacccaggctgatgtgggctggcatgtggggcagcaccaagggcctgggcctggccttgctcagtgcctgggagcagctgggcctgtctgtggccatctggacagatctgtttttgtcatgtctgcacggcctgatgttggtggccttgctcttggtggtagtgacctggagggtgtgtcagaagtcccactgcttccgactgggcaggcagctcagtaaggccttgcaagtgaactgcgtggtaaggaagctcctggtacagctgagacgtctgtattggtgggtggagactatgactgccctcacctcctggcacctggcctatctcatcacttggaccacctgcctggcctcccacctgctgcaggctgcctttgagcacacgacccagctggccgaggcccaggaggttgaaccccaggaggtctcagggtcttccttgctgccctcactgtctgcgtcctcggactcagagtctggaacagttttgccagagcaagaaactcccagagaataaatgtatccccatctgccaaaaaaaaaaaaaaaa

SEQ ID NO: 2709 - DNA, 548 bp, Homo sapiens
ggcacgagagcagctgggcctgtctgtggccatctggacagatctgtttttgtcatgtctgcacggcctgatgttggtggccttgctcttggtggtagtgacctggagggtgtgtcagaagtcccactgcttccgactgggcaggcagctcagtaaggccttgcaagtgaactgcgtggtaaggaagctcctggtacagctgagacgtctgtattggtgggtggagactatgactgccctcacctcctggcacctggcctatctcatcacttggaccacctgcctggcctcccacctgctgcaggctgcctttgagcacacgacccagctggccgaggcccaggaggttgaaccccaggaggtctcagggtcttccttgctgccctcactgtctgcgtcctcggactcagagtctggaacagttttgccagagcaagaaactcccagagaataaatgtatccccatctgcaaaaaaaaaaaaaaaaaaaaaaaaaaaaaaaaaaaaaaaaaaaaaaaaaaaaaaaaaaaaaaaaaaaaaaaaaaaaaa

SEQ ID NO: 2710 - DNA, 1078 bp, Homo sapiens
  misc_feature (935)..(935): n equals a,t,g, or c
gaattcggcacgagggcctctctagttctttttacaagtcatttgcctttggacttttaagatctaaaaagtatcacattgcttatgggtatttttttgagattgtataatttaactaggaaacatgattttaggagtcatagtgtaatgattaggtgtggagactcttgactgtcagcctgtgtttgtatctctgcaccatgacttaatacttttacgaattttttttttttttggagacagtcttgctctgtcgccagactggagtgcagtggcgtgatcttggctcactgcaatctccgcctccggggttcaagcaattctcctgcctcagcytcctgagtaggtgggactacaggcatgtgccaccatgcccagctaattttttttgtatttttagtagaggcggggtttcaccatgttggccaggatggtctcgatctcctgatctcgtgatctgcccgcctcggcctcccaagtgctgggattacaggcgtgagccaccacacctagtctttaccaaattattaatctctccaagctgtaccctcctcatcttttaaaggagttgaaattaaacctttcttatgaagtagtgagagagaactaaatgagaaacaccatgttaaaatagtgcagttctgattttttgtagctcgtaatttcgtttgtattgatactgatttctgtatctgggaattaggttactgaacatgtattgctacttgagttgctttgtgctcgaattatatcagtagataagaaaataaataattaaaatttattgttttatgggatgggaaaaggaaagtcattattttaagcaagatatcaaatgcttaatctgtttgtgatatttgggggtttttagctattaaacacctttatttttgaaaattctgcagaaaaaaattattcaacagatactcggtttncagctgtgtatcagggaaacatgcagaatgacatggtttcctgcacagtcaaacttgcattcagttggggcaagaaaaaaataatgaaacattaaaaaaaaaaaaaaaaaactcgagggggggcccgtacccaatcgtccctc

SEQ ID NO: 2711 - DNA, 450 bp, Homo sapiens
ggtacgccgctgccagcccggcctgggcggccgcgcaacaaaggagtcacccggcgatgagccccggcacccccggaccgaccatgggcagatcccagggcagcccaatggatccaatggtgatgaagagacctcagttgtatggcatgggcagtaaccctcattctcagcctcagcagagcagtccgtacccaggaggttcctatggccctccaggcccacagcggtatccaattggcatccagggtcggactcccggggccatggccggaatgcagtaccctcagcagcagttctagctccgaaacaccctggattacagtctttgaagaagtaggagagccggtggccgaagtgcccactcatgacctggccttgctagtggaggtggcaaccagagaagctggagagcgcctcctgatccacagggaacttcagtaaatccttttg

SEQ ID NO: 2712 - DNA, 549 bp, Homo sapiens
  misc_feature (476)..(476): n equals a,t,g, or c
  misc_feature (479)..(479): n equals a,t,g, or c
ggtacgccgctgccagcccggcctgggcggccgcgcaacaaaggagtcacccggcgatgagccccggcacccccggaccgaccatgggcagatcccagggcagcccaatggatccaatggtgatgaagagacctcagttgtatggcatgggcagtaaccctcattctcagcctcagcagagcagtccgtacccaggaggttcctatggccctccaggcccacagcggtatccaattggcatccagggtcggactcccggggccatggccggaatgcagtaccctcagcagcagatgccacctcagtatggacagcaaggtgtgagtggttactgccagcagggccaacagccatattacagccagcagccgcagcccccgcacctcccaccccaggcgcagtatctgccgtcccagtcccagcagaggtaccagccgcagcaggtgagcacagtgcactgccccgcaggccctgtnttntccaccaaggcagacccggctctgaatcatcttcctgtcctttattaaaaattatgttctggtggaaaaa

SEQ ID NO: 2713 - DNA, 1148 bp, Homo sapiens
  misc_feature (1120)..(1120): n equals a,t,g, or c
  misc_feature (1142)..(1142): n equals a,t,g, or c
  misc_feature (1144)..(1144): n equals a,t,g, or c
cctttattaaaaattatgttctggtggaaaaaaaattaggtttgagaaaakgcataactgtaacctaatctaactccatctccccctccgtcttttccccttttgagattggagggtgagaagaatgactggtttaatagctgcttgcattactggttagtggcagcagaaagtgtcagtcattgcttgttccctgtcatttgwgtctgamccttycaagaaagcactctgccactttgttaaggcttattcaggagaaggattttatcaatcatttaatccttctagttggcacgtgcatggtatttttatcttgacctttgttttgttttgttttaatggtaagtgctactttgtgaaaacattgttgcctttgactgtgttattctatttaawytagcttataagtagatattcacttcagktgcagtatattaaaatactaattggaaycatgtactttaaatatatcaagcagtttctagtttaaattagtctcattaaatactcctttaggttactgggttatatatttcagcttacagaatttgtggaaaaatagtatatatgttatttgataaaatgattcagtttccttatgttttagagactgtcactcatgagtgacatgaaaagaagtagtgagtgagggactcttactctgaatccagataaaatgttcgtagcacatccaatcataaacatcaaaatataattttccattttaatacttccttccttctcttttgtgtggtggaggtggcaaagagaaggtgaacacatgtagcatcgactttttcctctttaaaggacttcttttgtggcttgaatagatcgtggatattaagcaaaataaataaatttacggagcttaattttaatcagtttggctggtttcttacatattttcttgggtttgttggagtccctttccgtatgacttactagagaattctaaagagagtttatgatttgaagcaaaacatgttaaaacaacagctaggattcgagacccagtacaatcttgtttttacatacatgtatttaaaagcttgaacccgggaggcggaggttgcagtgagcggagaccacatcactgcactccagccttgcaacagantgagactctgtctcaaaaaaananaaaa

SEQ ID NO: 2714 - DNA, 1680 bp, Homo sapiens; identical to SEQ ID NO: 1056

SEQ ID NO: 2715 - DNA, 1864 bp, Homo sapiens
  misc_feature (7)..(7): n equals a,t,g, or c
  misc_feature (32)..(32): n equals a,t,g, or c
  misc_feature (40)..(40): n equals a,t,g, or c
  misc_feature (47)..(47): n equals a,t,g, or c
  misc_feature (55)..(55): n equals a,t,g, or c
  misc_feature (181)..(181): n equals a,t,g, or c
  misc_feature (1572)..(1572): n equals a,t,g, or c
  misc_feature (1783)..(1783): n equals a,t,g, or c
  misc_feature (1785)..(1785): n equals a,t,g, or c
  misc_feature (1794)..(1794): n equals a,t,g, or c
  misc_feature (1836)..(1836): n equals a,t,g, or c
  misc_feature (1856)..(1856): n equals a,t,g, or c
  misc_feature (1861)..(1861): n equals a,t,g, or c
gtatttncccgccttttgagtgaagcttaatncccggctngccgaanccgaacgnccgaagcccagcgagtcagttaaccgagaaagcgaaagagcgcccaatacgcaaaccgcctctccccgcgcgttgcccgattcattaatgcagctggcacgacaggtttcccgactgaaaagcggncagtgagcgcaacgcaattaatgtgagttagctcactcattaggcaccccaggctttacactttatgcttccggctcgtatgttgtgtggaattgtgagcggataacaatttcacacaggaaacagctatgaccatgattacgccaagctcgaaattaaccctcactaaagggaacaaaagctggagctccaccgcggtggcggccgctctagaactagtggatcccccgggctgcaggaattcggcacgagctggaaccagcaagtcccagacaaggagagcggaggaggaagtcatgggaacgcagcctccagttgtagcaggtttcactattcctatgctggggtacacagtgagagtactcacttttcacttgtcttgctcttagattgggccatggctttcatcctgtgtcccctgacctgtccaggtgagtgtgagggcagcactgggaagctggagtgctgcttgtgcctcccttcccagtgggctgtgttgactgctgctccccacccctaccgatggtcccaggaagcagggagagttggggaaggcaagattggaaagacaggaagaccaaggcctcggcagaactctctgtcttctctccacttctggtcccctgtggtgatgtgcctgtaatctttttctccacccaaaccccttcccacgacaaaaacaagactgcctccctctcttccgggagctggtgacagccttgggcctttcagtcccaaagcggccgatgggagtctccctccgactccagatatgaacagggcccaggcctggagcgtttgctgtgccaggaggcggcagctcttctgggcagagcctgtccccgccttccctcactcttcctcatcctgcttctcttttcctcgcagatgataaaaggaatctggcattctacacctggaccatttgattgttttattttggaattggtgtatatcatgaagccttgctgaactaagttttgtgtgtatatatttaaaaaaaaaatcagtgtttaaataaagacctatgtacttaatcctttaactctgcggatagcatttggtaggtagtgattaactgtgaataataaatacacaatgaattcttmaaaaaaaaaaaaaaaaaaaaaaactcgagggggggcccggtacccaattcgccctatagtgagtcgtattacaattcactggccgtcgttttacaacgtcgtgactgggaaaaccctggcgttacccaacttaatcgccttgcagcacatccccctttcgccagctggcgtaatagcgaagaggcccgcaccgatcgcccttcccaacagttgcgcagcctgaatggcgaatggcaaattgtaagcgttaatattttgttaaaattcgcgttaaatttttgntaaatcagctcattttttaaccaataggccgaaatcggcaaaatcccttataaatcaaaagaatagaccgagatagggttgagtgttgttccagtttggaacaagagtccactattaaagaacgtggactccaacgtcaaagggcgaaaaaccgtctatcagggcgatggcccactacgtgaaccatcaccctaatcaagttttttggggncnaggtgccgnaaagcctaaatcggaaccctaaagggagcccccgatttaaancttgacggggaaagcccgcnaacgnggc

SEQ ID NO: 2716 - DNA, 1008 bp, Homo sapiens
ggcacgagctcgtgccgctccagactaggcctgtgttggctcggaaccctcccttcctacagcagagacccaccgaggcagagggcttcagagagccccacgaggttgtgtccatagtggcgactctggagagtatagctgctgggtgcagctgctccgtggccagcttcacggcggcaccaggtggtgacagctgttggcagagctgtgtgcagcgctctgtgcatgcacttacccctcagacttgagaaatggctttgctccaaagtcgtactctcattttcattttcatgagtcacagctggggccttgtgggaagaatcgaaggtcagcttactcaggagtgaggggcatcaggtccagtcacaggccagccagggtgaggaccagggtggaccactcagctctgggaccctgtgtgtgtgtagggagggagaagaggtgggaggaccatgggctgcttatccccaggaggtgggacgaagggggaggcctgatgctgggaggcttgtgtggtccgccaccaacagatggctcctaccagggcgacagggacggaggcgccggtggcaactggtgctgggtcagaaccaagccactgcgtgctgtcgtgggtgcagaagcttagctttggggtagaagggacagtgggccaggggccttccctcaagaagctccagctcactgaaagcccaagcagacccctgaaggactatatctctgtgtgccgagatgctcccctccatgagctccaccttcattgtgcataggacgctgattcttagtacacagcagcaacagagcttcagcagatgccttcttgggaccgcgcttgactctagttccttctccccgggagggagaaagggaaggagcctttgaaatttcccctttcgctatgtttcactggtttttaaacaaatagggctaaatagagaccaataagttaaccatgtaccttaacgtgcggctttaggcaaaatgttattcaaaaaaaaaaaaaaaaaa

SEQ ID NO: 2717 - DNA, 1226 bp, Homo sapiens; identical to SEQ ID NO: 1931
  misc_feature (15)..(15): n equals a,t,g, or c
  misc_feature (29)..(29): n equals a,t,g, or c
  misc_feature (1106)..(1106): n equals a,t,g, or c

SEQ ID NO: 2718 - DNA, 1234 bp, Homo sapiens
  misc_feature (791)..(791): n equals a,t,g, or c
  misc_feature (986)..(986): n equals a,t,g, or c
  misc_feature (1055)..(1055): n equals a,t,g, or c
  misc_feature (1061)..(1061): n equals a,t,g, or c
  misc_feature (1141)..(1141): n equals a,t,g, or c
ccgcctgaccgccccgggcttaagggagcctggctaggccggcagccggatggtcccgcagctcggggccggccatgcttcgcggtccgtggcgccagctttggctctttctcctgctgctgctcccgggcgcgcctgagccccgcggcgcctccaggccgtgggagggaaccgacgagccgggctcggcctgggcctggccgggcttccagcgcctgcaggagcagctcagggcggcgggtgccctctccaagcggtactggacgctcttcagctgccaggtgtggcccgacgactgtgacgaggacgaggaggcagccacggggcccctgggctggcgccttcctctgttgggccagcggtacctggacctcctgaccacgtggtactgcagcttcaaagactgctgccctagaggggattgcagaatctccaacaactttacaggcttagagtgggacctgaatgtgcggctgcatggccagcatttggtccagcagctggtcctaagaacagtgaggggctacttagagacgccccagccagaaaaggcccttgctctgtcgttccacggctggtctggcacaggcaagaacttcgtggcacggatgctggtggagaacctgtatcgggacgggctgatgagtgactgtgtcaggatgttcatcgccacgttccactttcctcaccccaaatatgtggacctgtacaaggagcagctgatgagccagatccgggagacgcagcaagctctgccaccagaccctggtcatctttgatgaaagcggaanaacttgaacccaagggcttgctggaaggtccttggggccacacttaagaacgcccgggccccttgaagggcccacaagggcttgaagtctccatgggactatctttctggtttctcagtaaatctcaggggccgatataaatcaaatgaaggtgggtcctaaagtttgctcaaggcttgggatgggtccccgggnaaggaaaattaccgatgggaacacctgggagcccccacctccaggccggaagattgtgggaagacccantagacnatggcttttggcccacaagcccgtcttggtgaaaggaaaaacctggattgactacttcaatcccctttctggcctttggnagtacccgtcacgtggaggcttgtgtgcacgggaatgcctttctgaaccaggaacttctggattaaggaagagaccctggatgaaatagccca

SEQ ID NO: 2719 - DNA, 1710 bp, Homo sapiens
ctcgagttttttttttttttttttttttttttttttttttttttttttttaggaaaatcaaaaattttaatcttatcatctttacatacaacaaacatgtcaagaccccctattgtctttgaaaaggtcccccctcccccgccaaaatctgtagaccataagtcttggcctacactgacctggtttgtaaaatatcttcctctgtgtacttttcccttcagcctcaggctcttggctgattcgctcacaacagaagcagcttggctttcctctggaagtaccaatttgaaagcccaccagcccgcaaacctagagtgtattctccacccctgggtcacagaacttcgttctccccggctctgtaacccaaggaccctacagcctctgaggcctaacacccaagctcttccttgcagaagagctgagatgctaaggagaccatctggagtgtcataataagcccttgggatttgctgagctcccacatggctttcttcaaccacctggcccactttcttcaaccacattccactttggaatgcgtgtctttaaggcaccaagtgatcttaagaatgggctctgtttttgaattcagcaatccaagttcctatctatctcggtgggacctccaaaaaaaagaaaaaggattggcttggcttctaatgtaaggcctgccttttacacaccagttgtgtgtttgttagtggctgctggatgccagtccacaccctcaaacacctcacagtcccaaacggggtgctcctacaggtcccagggtcctgttagtggaagaaaggcagttccaggaagtcttcctctagccttcatgacaggaagtagttaatcctctgggaaatagacttgcagccctgggaagaaaagagttgttcctccttggggacatacaccatcatctgggctatttcatccagtgtctcttctttatacaggagctcctggctcaggaaggcatcccgtgcacacagcctcacgtgacggtactccaaaggcaggaaggggatgaagtagtcaatcaggttttccttcacaagacggctgtggccaaagccattgtctatggtctccacaatctccgcctggaggtggggctccaggtgttccatcgtaatttcttcccgggaccatccagccttgagcaactttaggaccacctcattgattatatcgcccctgagattactgagaaacagaaagatagtccatggagactcagccctgtggccctcaggggcccggcgttctaagtgtggcccaaggacctccagcagccctgggtgcagcttctccgcttcatcgaagatgaacagggtctggtggcagagctgctgcgtctcccggatctggctcatcagctgctccttgtacaggtccacatatttggggtgaggaaagtggaacgtggcgatgaacatcctgacacagtcactcatcagcccgtcccgatacaggttctccaccagcatccgtgccacgaagttcttgcctgtgccagaccagccgtggaacgacagagcaagggccttttctggctggggcgtctctaagtagcccctcactgttcttaggaccagctgctggaccaaatgctggccatgcagccgcacattcaggtcccactctaagcctgtaaagttgttggagattctgcaatcccctctagggcagcagtctttgaagctgcctcgtgcc

SEQ ID NO: 2720 - DNA, 1805 bp, Homo sapiens
ggcacgagccgcctgaccgccccgggcttaagggagcctggctaggccggcagccggatggtcccgcagctcggggccggccatgcttcgcggtccgtggcgccagctttggctctttttcctgctgctgctcccgggcgcgcctgagccccgcggcgcctccaggccgtgggagggaaccgacgagccgggctcggcctgggcctggccgggcttccagcgcctgcaggagcagctcagggcggcgggtgccctctccaagcggtactggacgctcttcagctgccaggtgtggcccgacgactgtgacgaggacgaggaggcagccacggggcccctgggctggcgccttcctctgttgggccagcggtacctggacctcctgaccacgtggtactgcagcttcaaagactgctgccctagaggggattgcagaatctccaacaactttacaggagcagctgatgagccagatccgggagacgcagcagctctgccaccagaccctgttcatcttcgatgaagcggagaagctgcacccagggctgctggaggtccttgggccacacttagaacgccgggcccctgagggccacagggctgagtctccatggactatctttctgtttctcagtaatctcaggggcgatataatcaatgaggtggtcctaaagttgctcaaggctggatggtcccgggaagaaattacgatggaacacctggagccccacctccaggcggagattgtggagaccatagacaatggctttggccacagccgtcttgtgaaggaaaacctgattgactacttcatccccttcctgcctttggagtaccgtcacgtgaggctgtgttcacgggatgccttcctgagccaggagctcctgtataaagaagagacactggatgaaatagcccagatgatggtgtatgtccccaaggaggaacaactcttttcttcccagggctgcaagtctatttcccagaggattaactacttcctgtcatgaaggctagaggaagacttcctggaactgcctttcttccactaacaggaccctgggacctgtaggagcaccccgtttgggactgtgaggtgtttgagggtgtggactggcatccagcagccactaacaaacacacaactggtgtgtaaaaggcaggccttacattagaagccaagccaatcctttttcttttttttggaggtcccaccgagatagataggaacttggattgctgaattcaaaaacagagcccattcttaagatcacttggtgccttaaagacacgcattccaaagtggaatgtggttgaagaaagtgggccaggtggttgaagaaagccatgtgggagctcagcaaatcccaagggcttattatgacactccagatggtctccttagcatctcagctcttctgcaaggaagagcttgggtgttaggcctcagaggctgtagggtccttgggttacagagccggggagaacgaagttctgtgacccaggggtggagaatacactctaggtttgcgggctggtgggctttcaaattggtacttccagaggaaagccaagctgcttctgttgttgagcgaatcagccaagagcctgaggctgaagggaaaagtacacagaggaagatattttacaaaccaggtcagtgtaggccaagacttatggtctacagattttggcgggggaggggggaccttttcaaagacaatagggggtcttgacatgtttgttgtatgtaaagatgataagattaaaatttttgattttcctaaaaaaaaaaaaaaaaaaaa

SEQ ID NO: 2721 - DNA, 2080 bp, Homo sapiens
ccacgcgtccggggagcctggctaggccggcagccggatggtcccgcagctcggggccggccatgcttcgcggtccgtggcgccagctttggctctttctcctgctgctgctcccgggcgcgcctgagccccgcggcgcctccaggccgtgggagggaaccgacgagccgggctcggcctgggcctggccgggcttccagcgcctgcaggagcagctcagggcggcgggtgccctctccaagcggtactggacgctcttcagctgccaggtgtggcccgacgactgtgacgaggacgaggaggcagccacggggcccctgggctggcgccttcctctgttgggccagcggtacctggacctcctgaccacgtggtactgcagcttcaaagactgctgccctagaggggattgcagaatctccaacaactttacaggcttagagtgggacctgaatgtgcggctgcatggccagcatttggtccagcagctggtcctaagaacagtgaggggctacttagagacgccccagccagaaaaggcccttgctctgtcgttccacggctggtctggcacaggcaagaacttcgtggcacggatgctggtggagaacctgtatcgggacgggctgatgagtgactgtgtcaggatgttcatcgccacgttccactttcctcaccccaaatatgtggacttgtacaaggagcagctgatgagccagatccgggagacgcagcagctctgccaccagaccctgttcatcttcgatgaagcggagaagctgcacccagggctgctggaggtccttgggccacacttagaacgccgggcccctgagggccacagggctgagtctccatggactatctttctgtttctcagtaatctcaggggcgatataatcaatgaggtggtcctaaagttgctcaaggctggatggtcccgggaagaaattacgatggaacacctggagccccacctccaggcggagattgtggagaccatagacaatggctttggccacagccgtcttgtgaaggaaaacctgattgactacttcatccccttcctgcctttggagtaccgtcacgtgaggctgtgtgcacgggatgccttcctgagccaggagctcctgtataaagaagagacactggatgaaatagcccagatgatggtgtatgtccccaaggaggaacaactcttttcttcccagggctgcaagtctatttcccagaggattaactacttcctgtcatgaaggctagaggaagacttcctggaactgcctttcttccactaacaggaccctgggacctgtaggagcaccccgtttgggactgtgaggtgtttgagggtgtggactggcatccagcagccactaacaaacacacaactggtgtgtaaaaggcaggccttacattagaagccaagccaatcctttttcttttttttggaggtcccaccgagatagataggaacttggattgctgaattcaaaaacagagcccattcttaagatcacttggtgccttaaagacacgcattccaaagtggaatgtggttgaagaaagtgggccaggtggttgaagaaagccatgtgggagctcagcaaatcccaagggcttattatgacactccagatggtctccttagcatctcagctcttctgcaaggaagagcttgggtgttaggcctcagaggctgtagggtccttgggttacagagccggggagaacgaagttctgtgacccaggggtggagaatacactctaggtttgcgggctggtgggctttcaaattggtacttccagaggaaagccaagctgcttctgttgtgagcgaatcagccaagagcctgaggctgaagggaaaagtacacagaggaagatattttacaaaccaggtcagtgtaggccaagacttatggtctacagattttggcgggggaggggggaccttttcaaagacaatagggggtcttgacatgtttgttgtatgtaaagatgataagattaaaatttttgattttcctaaaaaaaaaaaaaaaaaaaaaaaaaaaaaaaaaaaaaaaaaaaactcgag

SEQ ID NO: 2722 - DNA, 1261 bp, Homo sapiens
  misc_feature (1226)..(1227): n equals a,t,g, or c
gtcacactccctttaggtgggacaggcccgccacagtcagagaacaggtgccagggaacatgaccagcctcttctgccaccactccatgtagaggaagtgatgggttcctggtgggcctcccaggcactataacccaggggcaggtggtcaggcaaaaagccttcctgcacaaggactccagctctatgtgtcttctaggatctataagtaccaggcccacggctatgccttctcgggtgtggaggagctgctctactcactgggggagtccacctttgttaacatgacccaggactgaataaaccatgctcgcccaccaggcttctttctgacccctcatgtatcaagcatctccaggtgacctactgtctgcctatattaagggtccacacggcggctgctgcttttttttaagggggaaagtaagaaaagagaaggaaatccaagccagtatatttgttttatttattttttttaagaagaaaaaagttcatcttcacaaggtgcttcagacttggtttcttagctagaaaccagaagactacgggagggaatataaggcagagaactatgagtcttattttattactgtttttcactacctactcccacaatggacaatcaattgaggcaacctacaagaaaacatttacaaccagatggttacaaataaagtagaagggaagatcagaaaacctaagaaatgatcatagctcctggttactgtggacttgatagatttgaggtacctagttcagaactccctagtcaccatctccaagcctgtcaacatcactgcatattggaggagatgactgtggtaggacccaaggaagagatgtgtgcctgaatagtcgtcaccatatctccaagcttcctggcaaccagtgggaaaagaaacatgcgaggctgtaggaagagggaagctcttccttggcacctagaggaattagccattctcttccttatgcaaagattgaggaatgcaacaatataaagaagagaagtccccagatggtagagagcagtcatatcttacccctagatgttcatcccagcagaagaaagaagaaggtgttggggtaggattcttcagaggttagcctggtactttctcatcagacactagcttgaagtaagaggagaattatgcttttctttgctttttctacaaacccttaaaaatcacttgttttaaaaagaaagtaaaagcccttttcattcnnaaaaaaaaaaaaaaaaaaaaaaaaaaaaaaaaaa

SEQ ID NO: 2723 - DNA, 2258 bp, Homo sapiens
  misc_feature (2032)..(2032): n equals a,t,g, or c
  misc_feature (2233)..(2233): n equals a,t,g, or c
  misc_feature (2236)..(2236): n equals a,t,g, or c
  misc_feature (2255)..(2255): n equals a,t,g, or c
gcccgctagcgcctgaatccggcgtgctgcccgctcgccgcccgccatggcccgcgcacccccgctgctcgccgcgttgaccgcgctcctcgccgccgccgctgctggcggagatgccccgccgggcaaaatcgcggtggttggggctgggattgggggctctgctgtggcccattttctccagcagcactttggacctcgggtgcagatcgacgtgtacgagaagggaaccgtgggtggccgcttggccaccatctcagtcaacaagcagcactatgagagcggggctgcctccttccactccctgagcctgcacatgcaggacttcgtcaagctgctggggctgaggcaccggcgcgaggtggtgggcaggagcgccatcttcggcggggagcacttcatgctggaggagactgactggtacctgctgaacctcttccgcctctggtggcactatggcatcagcttcctgaggctgcagatgtgggtggaggaggtcatggagaagttcatgaggatctataagtaccaggcccacggctatgccttctcgggtgtggaggagctgctctactcactgggggagtccacctttgttaacatgacccagcactctgtggctgagtccctgctgcaggtgggcgtcacgcagcgctttattgatgatgtcgtttctgctgtcctgcgggccagctatggccagtcagcagcgatgcccgcctttgcaggagccatgtcactagccggggcccaaggcagcctgtggtctgtggaaggaggcaataagctggtttgttccggtttgctgaagctcaccaaggccaatgtgatccatgccacagtgacctctgtgaccctgcacagcacagaggggaaagccctgtaccaggtggcgtatgagaatgaggtaggcaacagctctgacttctatgacatcgtggtcatcgccacccccctgcacctggacaacagcagcagcaacttaacctttgcaggcttccacccgcccattgatgacgtgcagggctctttccagcccaccgtcgtctccttggtccacggctacctcaactcgtcctacttcggtttcccagaccctaagcttttcccctttgccaacatccttaccacagatttccccagcttcttctgcactctggacaacatctgccctgtcaacatctctgccagcttccggcgaaagcagccccaggaggcagctgtttggcgagtccagtcccccaagcccctctttcggacccagctaaagaccctgttccgttcctattactcagtgcagacagctgagtggcaggcccatcccctctatggctcccgccccacgctcccgaggtttgcactccatgaccagctcttctacctcaatgccctggagtgggcggccagctccgtggaggtgatggccgtggctgccaagaatgtggccttgctggcttacaaccgctggtaccaggacctagacaagattgatcaaaaagatttgatgcacaaggtcaagactgaactgtgagggctctagggagagcctgggaactttcatcccccactgaagatggatcatcccacagcagcccaggactgaataagccatgctcgcccaccaggcttctttctgacccctcatgtatcaagcatctccaggtgacctactgtctgcctatattaagggtccacacggcggctgctgcttttttttaagggggaaagtaagaaaagagaaggaaatccaagccagtatatttgttttatttattttttttaagaagaaaaaagttcatcttcacaaggtgcttcagacttggtttcttagctagaaaccagaagactacgggagggaatataaggcagagaactatgagtcttattttattactgkttttcactacctactcccacaatggacaatcaattgaggcaacctacaagaaaacatttacaaccagatggttacaaataaagtagaagggaagatcagaaaacctaagaaatgatcatagctyctggttactgnggacttgatagatttgaggtacctagtcagaactccctagtcaccatcttcaagcctgcaacatcactgcatattggaggagatgactgtggtaggacccaaggaagaratgtgtgcctgaatagtcgcaccatatcttcaagctttctggcaaccagtgggaaaagaaacatgccaagcttgtaggaagaggggaagctnttncttggcacctagagggaantag

SEQ ID NO: 2724 - DNA, 238 bp, Homo sapiens
tcgacccacgcgtccgcggacgcgtggggcccgctcgccgcccgccatggcccgcgcacccccgctgctcgccgcgttgaccgcgctcctcgccgccgccgctgctggcggagatgccccgccgggcaaaatcgcggtggttggggctgggattgggggctctgctgtggcccattttctccagcagcactttggacctcgggtgcagatcgacgtgtacgagaagggaacgtgggtg

SEQ ID NO: 2725 - DNA, 2543 bp, Homo sapiens
acgcgtggggcccgctcgccgcccgccatggcccgcgcacccccgctgctcgccgcgttgaccgcgctcctcgccgccgccgctgctggcggagatgccccgccgggcaaaatcgcggtggttggggctgggattgggggctctgctgtggcccattttctccagcagcactttggacctcgggtgcagatcgacgtgtacgagaagggaaccgtgggtggccgcttggccaccatctcagtcaacaagcagcactatgagagcggggctgcctccttccactccctgagcctgcacatgcaggacttcgtcaagctgctggggctgaggcaccggcgcgaggtggtgggcaggaacgccatcttcggcggggagcacttcatgctggaggagactgactggtacctgctgaacctcttccgcctctggttggcaatatggcaatcagttccttaaggctgcacatgtgggtggaggaggtcatggagaagttcatgaggatctataagtaccacgcccacggctatgccttctcgggtgtggaggaactgctctactcactgggggaatccacctttgttaacatgacccagcactctgtggctggatccctgctgcaggtgggcgtcacgcagcgctttattgatgatgtcgtttctgctgtcctgcgggccagctatggccagtcagcagcgatgcccgcctttgcaggagccatgtcactagccggggcccaaggcagcctgtggtctgtggaaggaggcaataagctggtttgttccggtttgctgaagctcaccaaggccaatgtgatccatgccacagtgacctctgtgaccctgcacagcacagaggggaaagccctgtaccaggtggcgtatgagaatgaggtaggcaacagctctgacttctatgacatcgtggtcatcgccacccccctgcacctggacaacagcagcagcaacttaacctttgcaggcttccacccgcccattgatgacgtgcagggctctttccagcccaccgtcgtctccttggtccacggctacctcaactcgtcctacttcggtttcccagaccctaagcttttcccttttgccaacatccttaccacagatttccccagcttcttctgcactctggacaacatctgccctgtcaacatctctgccagcttccggcgaaagcagccccaggacgcagctgtttggcgagtccagtcccccaagcccctctttcggacccagctaaagaccctgttccgttcctattactcagtgcagacagctgagtggcaggcccatcccctctatggctcccgccccacgctcccgaggtttgcactccatgaccagctcttctacctcaatgccctggagtgggcggccagctccgtggaggtgatggccgtggctgccaagaatgtggccttgctggcttacaaccgctggtaccaggacctagacaagattgatcaaaaagatttgatgcacaaggtcaagactgaactgtgagggctctagggagagcctgggaactttcatcccccactgaagatggatcatcccacagcagcccaggactgaataagccatgctcgcccaccaggcttctttctgacccctcatgtatcaagcatctccaggtgacctactgtctgcctatattaagggtccacacggcggctgctgcttttttttaagggggaaagtaagaaaagagaaggaaatccaagccagtatatttgttttatttatttttttaagaagaaaaaagttcatcttcacaaggtgcttcagacttggtttcttagctagaaaccagaagactacgggagggaatataaggcagagaactatgagtcttattttattactgtttttcactacctactcccacaatggacaatcaattgaggcaacctacaagaaaacatttacaaccagatggttacaaataaagtagaagggaagatcagaaaacctaagaaatgatcatagctcctggttactgtggacttgatagatttgaggtacctagttcagaactccctagtcaccatctccaagcctgtcaacatcactgcatattggaggagatgactgtggtaggacccaaggaagagatgtgtgcctgaatagtcgtcaccatatctccaagcttccttggcaaccagtgggaaaagaaacatgcgaggctgtaggaagagggaagctcttccttggcacctagaggaattagccattctcttccttatgcaaagattgaggaatgcaacaatataaagaagagaagtccccagatggtagagagcagtcatatcttacccctagatgttcatcccagcagaagaaagaagaaggtgttggggtaggattcttcagaggttagcctggtactttctcatcagacactagcttgaagtaagaggagaattatgcttttctttgctttttctacaaacccttaaaaatcacttgttttaaaaagaaagtaaaagcccttttcattcaaaaaaaaaaaaaaaaaaaaaaaaaaaaaaa

SEQ ID NO: 2726 - DNA, 965 bp, Homo sapiens
cccattttaattgatctgtgaaaaaacttaagaaaatcacaatttcagctaacagcaattgtgtcccaaagatgaagatactataacctcaaatggtgcagatccagaactgggctggatgacatccctactgtgccatgtcctggggcatttggaagggactggacctctttcccctcatcaaaggaaacagcagtctttgcctctttctgttggttgtgcccaagggctacagtagctctgaaataacaagagctctgtaataacagtaataaatagctctgaaataacagtcctaagaactcctaaagtcctgagaacttttcttgtaatgcagctttttctcttcctgagaaacagtgtgttctaatgggattcccaggcagttcctacacctacggtgtgtgttccagcagggaggagttatgggctgggctgccttttcccatgggtcttcattcccaatggaaagttcactctgcttagtttggaattatttttctttcagttgttctggaacctttgctttttattgatttatacaatacaattggtgggagggtggacttgggatgggagtgggaaaagcatgtaagagctccttttgtgatggtccatctacccaaaagagatctgctttagtgaacgatactctttcatttttctaaattagatcaagttgttattgattttagatgacttgtatgcaaatttgaaaaacttttttttttaaagctgattgggaactacaaacaatgaatggaatctactgacacagctaattggaaaacagatgtcttcttctgtcctattgatgctggtgtttaaaaaacatcacttaaaaaaaaagaataaatagttctaaaagcaaaaaaaaaaaaaaaaaaaaaaaaaaaaaaaaaaaaaaaaaaaaaaaaaaaaaactcgagggggggcccgtacccaattcgccctatagtagcgat

SEQ ID NO: 2727 - DNA, 861 bp, Homo sapiens
  misc_feature (794)..(794): n equals a,t,g, or c
aagggattcttctggaccgttaaccacgtccccaaaggaaaaccacacacacattatttaagtactttccatcttcctagagaaatttagttacactgttgactccttccctaaaggggaggattgagggagacctcttcttttgcaaaatgcaatataaaaagccaggtaagcaataaacagaaarcaaaagtgagggattttttttgttgggttgtttggtttgggaaggggaggtgctatggaggttattgttgtgacatgttgcttcgaaatctataaaccmcacaacaggamcaactgtttttctgttttctgtgacaaggagtactgcagggmcamcctcacccagagctgcctgcacgatggtgcaaacatcttctccggctattctaaaagtaacaggtattccttcaaagaagctggcagtggaaggcccttcactgcatcggggagatactggagtcccaggctacggcgcacggcatagcgagcgagtgtttttagagttcctggagctgagcacagaacagtcagtttttcacatagctgcgggtctctggccacctctcgtggcatggtgccatttttcctcaattcaaagtgtccaacagctctgtggaggagctcaaagcaagagtcctctttctctgttccaagtcccctgactagcagagccaccaggcgggagatgggtgtctggcctattaggttgatgactctgacctctgcgccataatccagaaggatgstgacactctcaagatttcccttcatggcagcccagctgagcngtgtatcattgttgtaatccagggcattgacagaggccccgctctctaggagagcccgcacacactc

SEQ ID NO: 2728 - DNA, 532 bp, Homo sapiens
  misc_feature (446)..(446): n equals a,t,g, or c
  misc_feature (496)..(496): n equals a,t,g, or c
  misc_feature (515)..(515): n equals a,t,g, or c
  misc_feature (517)..(517): n equals a,t,g, or c
tcgacccacgcgtccgggcagtttggagcatgtgaacaccttgagccttgatgagttccagtatgtggtatattatgcagagcattcagagcaaatactctctctccgagcgcttaatccgaacaattgctgccatccgttccttcccacatgataatgtagaggacctcatcagagggggagcagatgtgaactgcactcatggcacactgaagcccttgcactgtgcctgtatggtgtcagatgctgactgtgtggagttacttctggaaaaaggagcccgaggtgaatgccctggatgggtataaccgaacagccctccactatgcagcagagaaagatgaggcttgtgtggaggtcctattggagtatggtgcaaaccccaatgctttggatggcaacagagataccccacttcactgggcaagcctttaagaacaatgctnartgtgtgcsggctctyctagaraagcgggcctctgtcaatgccctggantacaacaatgatacmccgntnactggctgccatgaa

SEQ ID NO: 2729 - DNA, 737 bp, Homo sapiens
  misc_feature (726)..(726): n equals a,t,g, or c
  misc_feature (736)..(736): n equals a,t,g, or c
aaccacaccctcactcaaagagaggaacagaaagcyggagctccaccgcggtggcggccgctctagaactagtggatcccccgkgctgcacctgcaaattagctggggtggatgggcgctggcagccggattgccgggcatcattatgctgctggtcaccccgctggtgatttacaccatgtatccaccagaaattaagaaggtggataacaaaaccatcgctaaagcgggccttgccgaactaggaccgatgaaaatccgcgaaaaaatgctgctcggtgtctttgtgctggcgctgctgggctggattttcagtaagtctctgggggttgatgaatccaccgtggcaatcgttgttatggcaaccatgctgctgctgggtatcgttacctgggaagacgtggttaaaaataaaggcggctggaataccttaatctggtacggcggtattatcggcttaagctccttattatcgaaagttaaattcttcgaatggttagctgaagtctttaaaaataacctggcatttgatggtcacggtaacgttgctttcttcgttattattttcctcagcattatcgtgcgttatttcttcgccatgcaatggaaattggcgaactattcctcgtctatcaaccgatcgttgatattaacacccgcgccattctgggcgcggargcgttgtgccgttgggtktctgcggaaacggggggccccggtaccccnattccccccna

SEQ ID NO: 2730 - DNA, 1156 bp, Homo sapiens
  misc_feature (4)..(4): n equals a,t,g, or c
  misc_feature (33)..(33): n equals a,t,g, or c
  misc_feature (1150)..(1150): n equals a,t,g, or c
  misc_feature (1153)..(1153): n equals a,t,g, or c
gggnactccacctcggtggcggccgctctaganctagtggatcccccgggctgcaggaattcggcacgagatgataatgtccggcctctggcctatcctgattctgatgctgtgctcatctgcttcgacattagccgaccagaaacactggacagtgttctcaagaagtggcaaggagagactcaagagttctgccccaatgccaaggttgtgctggttggctgtaaactggacatgcggactgacctggccacactgagggagctgtccaagcagaggcttatccctgttacacatgagcagggcactgtgctggccaagcaggtgggggctgtgtcctatgttgagtgctcctcccggtcctctgagcgcagcgtcagggatgtcttccatgtggctacagtggcctcccttggccgtggccataggcagctgcgccgaactgactcacgccggggaatgcagcgatccgctcagctgtcaggacggccagaccgggggaatgagggcgagatacacaaggatcgagccaaaagctgcaacctcatgtgaggggctaggagagggcagagtgtgaagaggggtggtgagggacacaattgttcccctgcctgcgcccaggcttcttgacctcctgatcctggctgggaagttagggcaggcagagcgagcaattctgggcaggggagctggagggcagaagggtatcatcgtttctcatctcctcctccctcctcttctccagtggatgttgagggagctaacagggctggcatctggggcatgaactgggatggggcaggtgggcgttagggaagctggtatcaaatggtgaccttggtggagtctcctatgtgaagagtaccctccctctccacccccagtccccatatcctggttctggcccaaggaaaatgtccattctatgaccttctcttttcctctcctctcacttctgcagctattctcacacatctaacctctaggcaacatgcactaaattcaaaagcaaggagaagcccttgccccccatcagtccaccagccctagaacctcccttgcctcaacagtcacctaataaagcccacctccatggaaaamaaaaaaaaaaaaactcgagggggggcccgtacccaatcgcctataatgnaanaca

SEQ ID NO: 2731 - DNA, 654 bp, Homo sapiens
  misc_feature (647)..(647): n equals a,t,g, or c
  misc_feature (651)..(651): n equals a,t,g, or c
ctgggaggacaggtgtgagctgccgcagccagcctgtttctctttttccactcttcttttttctcatctcttttctgggttgcctgtcggctttcttatctgcctgttttgcaagcaccttctcctgtgtccttgggagccctgagacttctttctctccttgcctccacccacctccaaaggtgctgagctcacatccacaccccttgcagccgtccatgccacagccccccaaggggccccattgccaaagcatgcctgcccaccctcgctgtgccttagtcagtgtgtacgtgtgtgtgtgtgtgtgtttggggggtggggggtgggtagctggggattgggccctctttctcccagtggaggaaggtgtgcagtgtacttcccctttaaattaaaaaacatatatatatatatatttggaggtcagtaatttccaatgggcgggaggcattaagcaccgaccctgggtccctaggccccgcctggcactcagccttgccagagattggctccagaatttttgccaggcttacagaacacccactgcctagaggccatcttaaaggaagcaggggctggatgcctttcatcccaactattctctgtggtatgaaaaagaaaaaaaaaaaaaaaaaaggggggcngctntag

SEQ ID NO: 2732 - DNA, 437 bp, Homo sapiens
  misc_feature (332)..(332): n equals a,t,g, or c
  misc_feature (348)..(348): n equals a,t,g, or c
  misc_feature (427)..(427): n equals a,t,g, or c
gatcttacatcaaggctccgctgagcagggccccttgacggtgcacgtggtgtgggtgaaccacggggccttccgcctgcaatggtgtccaaagtgctgcttccaccgcccgccccggacttaccactgcccctggtgcaacatctgtgtggaggactttgaccaccactgcaagtggstcaataactgcatcggwcaccgcaacttccgcttcttcatgctgcttgtcctgtccctgtgcctctactcgkgcgccatgctggtcacctgwctcatcttcctggtgcgcacaacccacctgcccttctccaccgacaaggccatcgccatcntggtggccgtgtccgncgcgggcctcctggtgcacgctgtccctcctgctgttgatccatgctctgttccgtgagcttttcctaccgcacctacnatggcaagtg

SEQ ID NO: 2733 - DNA, 2136 bp, Homo sapiens
ggacgagcagccgcagtcgccactggctgcctgaggtgctcttacagcctgttccaagtgtggcttaatccgtctccaccaccagatctttctccgtggattcctctgctaagaccgctgccatgccagtgacggtaacccgcaccaccatcacaaccaccacgacgtcatcttcgggcctggggtcccccatgatcgtggggtcccctcgggccctgacacagcccctgggtctccttcgcctgctgcagctggtgtctacctgcgtggccttctcgctggtggctagcgtgggcgcctggacggggtccatgggcaactggtccatgttcacctggtgcttctgcttctccgtgaccctgatcatcctcatcgtggagctgtgcgggctccaggcccgcttccccctgtcttggcgcaacttccccatcaccttcgcctgctatgcggccctcttctgcctctcggcctccatcatctaccccaccacctatgtccagttcctgtcccacggccgttcgcgggaccacgccatcgccgccaccttcttctcctgcatcgcgtgtgtggcttacgccaccgaagtggcctggacccgggcccggcccggcgagatcactggctatatggccaccgtacccgggctgctgaaggtgctggagaccttcgttgcctgcatcatcttcgcgttcatcagcgaccccaacctgtaccagcaccagccggccctggagtggtgcgtggcggtgtacgccatctgcttcatcctagcggccatcgccatcctgctgaacctgggggagtgcaccaacgtgctacccatccccttccccagcttcctgtcggggctggccttgctgtctgtcctcctctatgccaccgcccttgttctctggcccctctaccagttcgatgagaagtatggcggcagcctcggcgctcgagagatgtaagctgcagccgcagccatgcctactacgtgtgtgcctgggaccgccgactggctgtggccatcctgacggccatcaacctactggcgtatgtggctgacctggtgcactctgcccacctggtttttgtcaaggtctaagactctcccaagaggctcccgttccctctccaacctctttgttcttcttgcccgagttttctttatggagtacttctttcctccgcctttcctctgttttcctcttcctgtctcccctccctcccacctttttctttccttcccaattccttgcactctaaccagttcttggatgcatcttcttccttccctttcctcttgctgtttccttcctgtgttgttttgttgcccacatcctgttttcacccctgagctgtttctctttttcttttctttcttttttttttttttttttaagacggattcttactctgtggcccaggctggagcgcagtggtgcgatctcgactcactgcaacccccgcctcctgggttcaagcgattctcctgccccagcctcccaagtagctgggaggacaggtgtgagctgccgcacccagcctgtttctctttttccactcttcttttttctcatctcttttctgggttcctgtcggctttcttatctgcctgttttgcaagcaccttctcctgtgtccttgggagccctgagacttctttctctccttgcctccacccacctccaaaggtgctgagctcacatccacaccccttgcagccgtccatgccacagccccccaaggggccccattgccaaagcatgcctgcccaccctcgctgtgccttagtcagtgtgtacgtgtgtgtgtgtgtgtgtttggggggtggggggtgggtagctggggattgggccctctttctcccagtggaggaaggtgtgcagtgtacttcccctttaaattaaaaaacatatatatatatatatttggaggtcagtaatttccaatgggcgggaggcattaagcaccgaccctgggtccctaggccccgcctggcactcagccttgccagagattggctccagaatttttgccaggcttacagaacacccactgcctagaggccatcttaaaggaagcaggggctggatgcctttcatcccaactattctctgtggtatgaaaaagaaaaaaaaaaaaaaaaaa

SEQ ID NO: 2734 - DNA, 2187 bp, Homo sapiens; identical to SEQ ID NO: 2134

SEQ ID NO: 2735 - DNA, 702 bp, Homo sapiens
  misc_feature (15)..(15): n equals a,t,g, or c
  misc_feature (19)..(19): n equals a,t,g, or c
  misc_feature (38)..(38): n equals a,t,g, or c
ccccaggctttcctntttntgcttccgggctcgtatgntgtgtggaattgtgagcggataacaatttcacacaggaaacagctatgaccatgattacgccaagctcgaaattaaccctcactaaagggaacaaaagctggagctccaccgcggtggcggccgctctagaactagtggatcccccgggctgcaggaattcggcacgagatctaacaatccctggggagccggagaccggtgactgccgccctgcccgcaggccatgtggcccccgctgttgctgctgctgctgctgctcccggccgccccggtccccaccgccaaagccgctccccacccggatgctaacacccaggaaggccttcagaacctgctccaaggagtcggggctggcggagacggagagctgcgggcagactcacacctggccccgggctctggctgtattgatggggctgtggtggccacgcgaccagaaagccggggaggaagacctgcggttccgtgagaggcgtccagggctgcaggccacggcgacaggctccggggaacatggggctttccctgtccactcccaaggagtgtgggcctcaacgcattggcaggggacggccgtgtgccctctccagaccccacccccagatgcatttattagaaataataaagttctttcttagctaaaaaaaaaaaaaaaaaaaaaaa

SEQ ID NO: 2736 - DNA, 1790 bp, Homo sapiens
  misc_feature (28)..(28): n equals a,t,g, or c
  misc_feature (34)..(34): n equals a,t,g, or c
  misc_feature (41)..(41): n equals a,t,g, or c
  misc_feature (56)..(56): n equals a,t,g, or c
  misc_feature (82)..(82): n equals a,t,g, or c
  misc_feature (212)..(212): n equals a,t,g, or c
  misc_feature (229)..(229): n equals a,t,g, or c
aaccaagaaagcgaaaaagcgcccattncgcaanccgcctnttccccgcgcgttgnccgattcattaatgcagctggcacgncaggtttcccgactggaaagcggccagtgagcgcaacgcaattaatgtgagttagctcactcattaggcaccccaggctttacactttatgcttccggctcgtatgttgtgtggaattgtgagcggatancaatttcacacaggaancagctatgaccatgattacgccagctcgaaattaaccctcactaaagggaacaaaagctggagctccaccgcggtggcggccgctctagaactagtggatcccccgggctgcaggaattcggcacgagggagactgggagggcttccggggctgccggtctgagtgcagagctgctgtcatggcggccgctctgtggggcttctttcccgtcctgctgctgctgctgctatcgggggatgtccagagctcggaggtgcccggggctgctgctgagggatcgggagggagtggggtcggcataggagatcgcttcaagattgaggggcgtgcagttgttccaggggtgaagcctcaggactggatctcggcggcccgagtgctggtagacggagaagagcacgtcggtttccttaagacagatgggagttttgtggttcatgatataccttctggatcttatgtagtggaagttgtatctccagcttacagatttgatcccgttcgagtggatatcacttcgaaaggaaaaatgagagcaagatatgtgaattacatcaaaacatcagaggttgtcagactgccctatcctctccaaatgaaatcttcaggtccaccttcttactttattaaaagggaatcgtggggctggacagactttctaatgaacccaatggttatgatgatggttcttcctttattgatatttgtgcttctgcctaaagtggtcaacacaagtgatcctgacatgagacgggaaatggagcagtcaatgaatatgctgaattccaaccatgagttgcctgatgtttctgagttcatgacaagactcttctcttcaaaatcatctggcaaatctagcagcggcagcagtaaaacaggcaaaagtggggctggcaaaaggaggtagtcaggccgtccagagctggcatttgcacaaacacggcaacactgggtggcatccaagtcttggaaaaccgtgtgaagcaactactataaacttgagtcatcccgacgttgatctcttacaactgtgtatgttaactttttagcacatgttttgtacttggtacacgagaaaacccagctttcatcttttgtctgtatgaggtcaatattgatgtcactgaattaattacagtgtcctatagaaaatgccattaataaattatatgaactactatacattatgtatattaattaaaacatcttaatccagaaaaaaaaaaaaaaaaaaaaactcgagggggggcccggtacccaattcgccctatagtgagtcgtattacaattcactggccgtcgttttacaacgtcgtgactgggaaaaccctggcgttacccaacttaatcgccttgcagcacatccccctttcgccagctggcgtaatagcgaaaaggcccgcaccgatcgccctttccaacarttgcgcaacctgaatggcgaatggcaaattgtaagcgttaatattttggtaaaawtcgcgktaaaattttggtaaatcagctyattttttaaccaataggcccaaatcgggaaaatcccttataaatcaaaagaat

SEQ ID NO: 2737 - DNA, 932 bp, Homo sapiens; identical to SEQ ID NO: 2075
  misc_feature (546)..(546): n equals a,t,g, or c
  misc_feature (599)..(599): n equals a,t,g, or c
  misc_feature (792)..(792): n equals a,t,g, or c
  misc_feature (879)..(879): n equals a,t,g, or c

SEQ ID NO: 2738 - DNA, 879 bp, Homo sapiens; identical to SEQ ID NO: 1346

SEQ ID NO: 2739 - DNA, 914 bp, Homo sapiens
  misc_feature (872)..(872): n equals a,t,g, or c
  misc_feature (888)..(888): n equals a,t,g, or c
  misc_feature (901)..(901): n equals a,t,g, or c
  misc_feature (911)..(911): n equals a,t,g, or c
gtgggaatctcaccatgrcctggacccctctcctgctccccctcctcactttctgcacagtctctgtggcctcctatgagctgacacagccaccctcggtgtcagtgtccccaggacaaacggccaggatcacctgctctggagatgaattgccaaaaacatatgctttttggtaccagcagaagtcaggccaggcccctgtgctggtcatctatgcggacaacaaacgaccctcccggatccctgagagattctctggctccagctcagggacagtggccaccttgactatcagtggggcccaggtggaggatgcggctgactactactgttactcaacagacagcagtggtaatcatggggtcttcggaactgggaccaaggtcaccgtcctaggtcagcccaaggccaaccccactgtcactctgttcccgccctcctctgaggagctccaagccaacaaggccacactagtgtgtctgatcagtgacttctacccgggagctgtgacagtggcctggaaggcagatggcagccccgtcaaggcgggagtggagaccaccaaaccctccaaacagagcaacaacaagtacgcggccagcagctacctgagcctgacgcccgagcagtggaagtyccacagaagctacagctgccargtcacgcatgaagggarcaccgtggagaagacagtggcccctacagaatgttcataggttcccaactctaaccccacccacgggagcctggagctgcaggatcccaggggaagggtctctctccccatcccaagtcatccagcccttctccctgcactcatgaaaccccaataaatatcctcattgacaaccagaaaaaaaaaaaaaaaaacncaaaggggggccggtnccaattccccctnttttgattcnttt

SEQ ID NO: 2740 - DNA, 564 bp, Homo sapiens
  misc_feature (31)..(31): n equals a,t,g, or c
gaaaataaacttggatyytttaaaacggccnctttttttttttttttytggttgtcaatgaggatatttattggggtttcatgagtgcagggagaagggctggatgacttgggatggggagagagacccctcccctgggatcctgcagctccaggctcccgtgggtggggttagagttgggaacctatgaacattctgtaggggccactgtcttctccacggtgctcccttcatgcgtgacctggcagctgtagcttctgtgggacttccactgctcgggcgtcaggctcaggtagctgctggccgcgtacttgttgttgctctgtttggagggtttggtggtctccactcccgccttgacggggctgccatctgccttccaggccactgtcacagctcccgggtagaagtcactgatcagacacactagtgtggccttgttggcttggagctcctcagaggagggcgggaacagagtgacagtggggttggccttgggctgacctaggacggtgaccttggtcccagttccgaagacataaatgtcsctggtagaaaatgagc

SEQ ID NO: 2741 - DNA, 879 bp, Homo sapiens; identical to SEQ ID NO: 1348

SEQ ID NO: 2742 - DNA, 2064 bp, Homo sapiens
ggcacgagtttttcttttatagatttatgttttccatcattattcttttctcctattatgttcatgctatatcgctttcctataaatgcatattaggcctcatactttcctctgggtatcattttggctaaatcacgggttgcacaggtggtactctatggctctgctttacatactcatattttctgactttctttttgacaggaataatttagaagtattttgtttgatcttaaaatttctacgtcagcttattttaattgtccattattactatttctaagaaactgttcattgttattttccagcattattgcattgtgatctgtgaatatggcctgtgtaaattctgttttgcaatttgttagtaatttctgtatgatcctatatatggcctatttagaggatagtatttgaaaagaatgaggacaaaattctgtctgctaacctgaaggttgttagtcatatcatatcctttacttattttctgactatttaatctgttaattttcagaggaaattaatgatcactgtgattgtgattttgtcagttttttcttcaatttctatgcattttttgctttgtatttcacgtgtgtagaggtccagtggtttatcttcctggtggcttctttttttttttaatcagtgtgaaatatgtcccactttgtgtatacctcagtggcctttgcttttcttatttggttttctgtaacattgttatacctccgttcattttgttagcatatacctggtattattctctacatttatgcatgtgtgaatgaatgacaaggtccccctctgtcatctaggctggattgcagtagcatgctcatagcttactgcagcctcaaactcctggctcaagcaatcctcctgcctcagcctctcaagtagctgagactacaggcacacgccatcacactcagctaatctacttttatttttaacttttatcattttgttttagatatgtgacttatgaagaatacttagctgtttttttaacccagtctgagtcttttaataggtgcactttgtagtttaagtctcaataaactactgatacgcttaagcttttcctgccctcttatttttttcctattaaacgtgaattgtaatttgttcttttttgcttgtcctgtcttttattgaactgatttgaaatgtcttggttccattttattattttctcctaatggtttggaacctttatgcaaattgcatttgtaaagggtttaaagggtacatctaggaaattttaccaaacatgcagttggggattaaaggttggagcttgaaaaggaattggtagtggggatatagtttttatttctttttctttttctttcttttttttggttttctgggatatgagagagaggaaatagcttttaaactgtcatcttgttgatggaagtcatggtagtgtttgctattactgaggaaaatcacagagaacaaacactattgcctagcacaatgccaggtacataagtattcagtgaatgttttatgaatgcttaaataaatagagaagagaaaggactaagtgtggaatcaggggtaacagtgacattgaaagaggggaggaaaaactagcaaaagagagaaggagtagcttacaagacagaaggtaaacttagagtggtatctccaacaccatagaggagagaatttcataaaggagatgatagaaaacagtgctacatgctacagagagattaggtagcatgacaactgcaagtgagcctttggacagacccttgggtctggtgactggtggccttaggagagagtgtttagatagtagtactagaagttgagtgttgggattaaatgtagaggcagatgaaaaataagggcctttcttctatgaaattattcagggaaaactaaaaagaaaattggacatatctacaaggagatgtgagccaggagaatcgcttgaacctgggaggcagaggatgctgtgagccgagatcgcgccattgcactccagcctgggcaacaagagtaaatctctgtctcaccaaaaaaaaaaaaaaaaaaaaaaaaaaa

SEQ ID NO: 2743 - DNA, 1757 bp, Homo sapiens
  misc_feature (1751)..(1751): n equals a,t,g, or c
  misc_feature (1757)..(1757): n equals a,t,g, or c
cccacgcgtccgcgcccctcgcctccccgcagagtcccctcgcggcagagatgtgtgtggggtcagcccacggcgggractatggtgaaattcccggcgctcacgcactactggcccctgatccggttcttggtgcccctgggcatcaccaacatagccatcgacttcggggagcaggccttgaaccggggcattgctgctgtcaaggaggatgcagtcgagatgctggccagctacgggctggcgtactccctcatgaagttcttcacgggtcccatgagtgacttcaaaaatgtgggcctggtgtttgtgaacagcaagagagacaggaccaaagccgtcctgtgtatggtggtggcaggggccatcgctgcygtctttcacacactgatagcttatagtgatttaggatactacattatcaataaactgcaccatgtggacgagtcggtggggagcaagacgagaagggccttcctgtacctcgccgcctttcctttcatggacgcaatggcatggacccatgctggcattctcttaaaacacaaatacagtttcctggtgggatgtgcctcaatctcagatgtcatagctcaggttgtttttgtagccattttgcttcacagtcacctggaatgccgggagcccctgctcatcccgatcctctccttgtacatgggcgcacttgtgcgctgcaccaccctgtgcctgggctactacaagaacattcacgacatcatccctgacagaagtggcccggagctggggggagatgcaacaataagaaagatgctgagcttctggtggcctttggctctaattctggccacacagagaatcagtcggcctattgtcaacctctttgtttcccgggaccttggtggcagttctgcagccacagaggcagtggcgattttgacagccacataccctgtgggtcacatgccatacggctggttgacggaaatccgtgctgtgtatcctgctttcgacaagaataaccccagcaacaaactggtgagcacgagcaacacagtcacggcagcccacatcaagaagttcaccttcgtctgcatggctctgtcactcacgctctgtttcgtgatgttttggacacccaacgtgtctgagaaaatcttgatagacatcatcggagtggactttgcctttgcagaactctgtgttgttcctttgcggatcttctccttcttcccagttccagtcacagtgagggcgcatctcaccgggtggctgatgacactgaagaaaaccttcgtccttgcccccagctctgtgctgcggatcatcgtcctcatcgccagcctcgtggtcctaccctacctgggggtgcacggtgcgaccctgggcgtgggctccctcctggcgggctttgtgggagaatccaccatggtcgccatcgctgcgtgctatgtctaccggaagcagaaaaagaagatggagaatgagtcggccacggagggggaagactctgccatgacagacatgcctccgacagaggaggtgacagacatcgtggaaatgagagaggagaatgaataaggcacgggacgccatgggcactgcagggacagtcagtcaggatgacacttcggcatcatctcttccctctcccatcgtattttgttcccttttttttgttttgttttggtaatgaaagaggccttgatttaaaaaaaaaaaaaaaaaaaaaaaaaaaaaaaaaaaaaaaaaaaaaaaaaaaaaaaaaaaangggggn

SEQ ID NO: 2744 - DNA, 2575 bp, Homo sapiens; identical to SEQ ID NO: 1078

SEQ ID NO: 2745 - DNA, 1233 bp, Homo sapiens; identical to SEQ ID NO: 265

SEQ ID NO: 2746 - DNA, 1209 bp, Homo sapiens; identical to SEQ ID NO: 1075

SEQ ID NO: 2747 - DNA, 1436 bp, Homo sapiens
  misc_feature (1)..(1): n equals a,t,g, or c
  misc_feature (18)..(18): n equals a,t,g, or c
  misc_feature (30)..(30): n equals a,t,g, or c
  misc_feature (42)..(42): n equals a,t,g, or c
nccggggcgggggaatgnaaacggaaatcnccccttactatngggaaccaaagctggagctccaccgcggtggcggccgctctagaactagtggatcccccgggctgcaggaattcggcacgaggagctcggaggcggcacacccaggggggacgccaagggagcaggacggagccatggaccccgccaggaaagcaggtgcccaggccatgatctggactgcaggctggctgctgctgctgctgcttcgcggaggagcgcaggccctggagtgctacagctgcgtgcagaaagcagatgacggatgctccccgaacaagatgaagacagtgaagtgcgcgccgggcgtggacgtctgcaccgaggccgtgggggcggtggagaccatccacggacaattctcgctggcagtgcggggttgcggttcgggactccccggcaagaatgaccgcggcctggatcttcacgggcttctggcgttcatccagctgcagcaatgcgctcaggatcgctgcaacgccaagctcaacctcacctcgcgggcgctcgacccggcaggtaatgagagtgcatacccgcccaacggcgtggagtgctacagctgtgtgggcctgagccgggaggcgtgccagggtacatcgccgccggtcgtgagctgctacaacgccagcgatcatgtctacaagggctgcttcgacggcaacgtcaccttgacggcagctaatgtgactgtgtccttgcctgtccggggctgtgtccaggatgaattctgcactcgggatggagtaacaggcccagggttcacgctcagtggctcctgttgccaggggtcccgctgtaactctgacctccgcaacaagacctacttctcccctcgaatcccaccccttgtccggctgccccctccagagcccacgactgtggcctcaaccacatctgtcaccacttctacctcggccccagtgagacccacatccaccaccaaacccatgccagcgccaaccagtcagactccgagacagggagtagaacacgaggcctcccgggatgaggagcccaggttgactggaggcgccgctggccaccaggaccgcagcaattcagggcagtatcctgcaaaaggggggccccagcagccccataataaaggctgtgtggctcccacagctggattggcagcccttctgttggccgtggctgctggtgtcctactgtgagcttctccacctggaaatttccctctcacctacttctctggccctgggtacccctcttctcatcacttcctgttcccaccactggactgggctggcccagcccctgtttttccaacattccccagtatccccagcttctgctgcgctggtttgcggctttgggaaataaaataccgttgtatatattctgcaaaaaaaaaaaaaaaaaaaaaaactcga

SEQ ID NO: 2748 - DNA, 995 bp, Homo sapiens
  misc_feature (67)..(67): n equals a,t,g, or c
tactcaggggtccctttggaactctgacctccgcaacaagacctacttctcccctcgaatcccaccncttgtccggctgtcccctccagagcccacgactgtggcctcaaccacatctgtcaccacttctacctcggccccagtgagacccacatccaccaccaaacccatgccagcgccaaccagtcagactccgagacagggagtagaacacgaggcctcccgggatgaggagcccaggttgactggaggcgccgctggccaccaggaccgcagcaattcagggcagtatcctgcaaaaggggggccccagcagccccataataaaggctgtgtggctcccacagctggattggcagcccttctgttggccgtggctgctggtgtcctactgtgagcttctccacctggaaatttccctctcacctacttctctggccctgggtacccctcttctcatcacttcctgttcccaccactggactgggctggcccagcccctgtttttccaacattccccagtatccccagcttctgctgcgctggtttgcggctttgggaaataaaataccgttgtatatattctgccaggggtgttctagctttttgaggacagctcctgtatccttctcatccttgtctctccgcttgtcctcttgtgatgttaggacagagtgagagaagtcagctgtcacggggaaggtgagagagaggatgctaagcttcctactcactttctcctagccagcctggactttggagcgtggggtgggtgggacaatggctccccactctaagcactgcctcccctactccccgcatctttggggaatcggttccccatatgtcttccttactagactgtgagctcctcgagggcagggaccgtgccttatgtctgtgtgtgatcagtttctggcacataaatgcctcaataaagatttaattactttgtatagtgaaaaaaaaaaaaaaaaaactcgagggggggcccg

SEQ ID NO: 2749 - DNA, 1177 bp, Homo sapiens; identical to SEQ ID NO: 271

SEQ ID NO: 2750 - DNA, 1064 bp, Homo sapiens
  misc_feature (17)..(17): n equals a,t,g, or c
  misc_feature (20)..(20): n equals a,t,g, or c
  misc_feature (1036)..(1036): n equals a,t,g, or c
  misc_feature (1045)..(1045): n equals a,t,g, or c
  misc_feature (1062)..(1063): n equals a,t,g, or c
cttaagggggggcatcnaangggaaagactctgaggtgttytggyttttggaattttcagccttcttgtgctggtttttcctcatctccctggatttatctgcctttggtctttgatgttggtgacctttggatggggtttttgtgtggacatcgtttttgttgatgttgatgctattcctttctgttttttagtttttctcctaacaggcaggcttctctcctgcaggcctgctggagtttgctggaggtccactccagaccctgtttgcctgagtatcactagcagacactgcagaacagcaagattgctgcctgctccttcctctggaagtttcgtcccagaggggcacccgccagatgctagtggagctctcctgtatgaggtgtctgttgacccctgctgggaggtgtctcccagtcaggaggcacaggggtcagggacccacttgaggaggcagtctgtcccttagcagagtttgagtgctgtgctgggagattcgctgctctcttcagagctggcaggcaggaacatttacgtctgctgaagctgcacccacagccgcctcttccgccaggtcctctgtcccagagaggtgggagttttatctgttagcccctgactggggctgctgcctttctttcagagatgccctgtccagagaggaggaatctagagaggcagtctggctatggcagctttgcagagctgtggtgggctctgcccaattcgaacttcccagaagctttgtttatactgtgaggggaaaaccacctactcaagcctcagtaatggtggacgcttctccccacaccaagcttgagagtcccaggtcgacttcagactgctgtgctggcagcaagaatttcaagccagtggattttagcttgctgggctctgtggcggtgggatccactgatccacttggctccctggcttcagttccctttccaggagagtgaacagttctgtcgctggccttccaggtgtcactggggtatggaaaaaaaaaaaaaaaaaaattcgggggggcccntacccattngccttagggggcgtttnna

SEQ ID NO: 2751 - DNA, 771 bp, Homo sapiens
  misc_feature (730)..(730): n equals a,t,g, or c
  misc_feature (742)..(742): n equals a,t,g, or c
  misc_feature (755)..(755): n equals a,t,g, or c
  misc_feature (762)..(763): n equals a,t,g, or c
atactccagcctgggcaacaagagtgaactccatctcacacaaaaaaaagaatgttgaatattggcccgcactctcttctggcttgtagtgtttccgcagagaaatccactgttagtctgatgggcttccctttgtggataacccgacctttctctctggctgcccttaacgtttttttcattcctttcaaccttggtgaatctgatgattacgtgtcttggggctgctcttctcgagaagtatctttgtggtggtctctgtctttcctgaacttgaatgttggtctgtcttgctaggttggggaagttctcctggataatatcctgaagagtgttttccaacttggttccattctccccatcattttcaggtacaccagtcaaacataggtttggtcttctcacatagtcccatatttcttggaggctttgttcattccttttcattcatttttctctaatcttgtcttcatgctttatttcattaagttgatcttcaatctctgatatccttttttccacttgatcgatttggctattgatacttgkgtatgcttcacaaagttcttgtgctgtgtttttcagctccatcaggtcattgatgattttctctagactggttattctagttagcaattcttctaaccttctttcaaggttcttagtttccttgcagtgggttagaatgtgctcctttagctcggaggagttacccaccttccgaagcctncttctatcaatnacgagacttccanataaccnncgatggct

SEQ ID NO: 2752 - DNA, 1974 bp, Homo sapiens
ggcacgaggagaaatttgcaatatgtctcagtggaaaagagtaaagagaaacccatgttatggtacccagataaatgtcttgatcttctcttattaaaacacattacctgaagtagaaatgagctagtatcccactagtacgtggccccgccatacctgccccacgcatacactactttgagatctggcaacctaattacagtgccagtgggtgattggcccatatttctcacagtctgtatagcaacagcaagattgatgatgataacaggaagactttagaaaccctgcctctttcttctcaccacatttcccgaacactgacatcccaagtctccctgtttaccccatttcacactagttagaacaggcattgtcctaagttctctcaccatcatatgtaagatggatgatactcacatgggtgtctgggcttaggtgtaattctatcacctgtaactccatccctttttcttgcattttagaaggcatattaactttcagtctgttacagttgcttttattaaattattcacaaattttggcacttcattattagtgaccaactgttgttcaagtgatctagccccaccatagttgagaactcctgatttggggcatctgacataactatggtacttgtcctgaatcccccttctcttcttcattttctacaccactgataggattctccttcattcaaaacacatgttaagcactcagaaatgtaaagataaataaggctcagtcctggccccttaaagacagaatcttaattcacattaagggagacacacataaaataaccattctgtatgacttggtgtaatggtgcaaagaacagattgtcatgggatttgaggagattctaatctatgaattcaaagctatgatgttggcatcaggcctttttatgtgagtagcaaaggaagaaggcattccaggcagagagaaaaagatgaataatagtgtgaatgggcagagtctgagaactgggacaccttgactttctctagaatgtagggtgtgtggagccattaatggggatggagatgaggatggggtttggtcagatggttcaaggccttaaagagggtctcagggatttggtcctctatcctgtaggcaaagggaagctttgaataggcttttagcagtctgttgacttgatggaagagggtgggttggggctgctggaggaatggggtggagagagcctggaagttgagagacctgtcgggacacttggactgacccaggctgcaggtgagagaaatcagaagcccctcagcaggttggaaactagatatcttctttgtctttgtgttatcaggaccagcaccaggtgcctgacacacagtttgtgctcagtaaatagtagttgaacttaattaacccaattgactgtggaaagtaaagacagaggaaggaaaaaaatggcttcaccatgtttagcttgactagacacatgacttgcagtcacaagttgtcctgtgaataaagccattatgtggtaccaaaaaaaaaatgatgtttatcttgagataacaaatataggaagggcagtttgcgttattggagagtgggataaaatgtgttagtcttgaaaaggtctgatttggattgctggtgaaaggtgtccagtcaagatgtttaggagagagccggagacaaacctgggctctcaagtcagatctgcctcttgggcatggattaatttgggagttgtaccttttagtatctatccttattctttctctattagcaaagcttctcagcttcctatacctgaagccccatcctgccctactcagaagataaataggttcactgtgggacagggcctctgccagtgaagcagcttctgtctcaagacgtcaaaactttgacttgtcttaagatagctttatgtgcaaagttgtttgagcatgcaaacccattataaactgtcttattaaaaaaaaaaaaaaaaaa

SEQ ID NO: 2753 - DNA, 1974 bp, Homo sapiens; identical to SEQ ID NO: 2752

SEQ ID NO: 2754 - DNA, 1110 bp, Homo sapiens
ggcacgagagcccgcatcctctgagctcccgctgcagccactctccctccctccctcgggctctcacccactttgctttctgcctccgtagggtcaatccatcctccccaggtgggttctcagccctctctgagggcagattctctggtgaccttgacgcccgtcagcgccttgggggccacagaggccaggcagtgtgggtgggctctctgtggatgggaggtgggtgggcaatggagcaacaggtttgcccatgcagggggctctccaggttctctccttgggttctgggcctgatgtgggatcctctgccccttctgaactgagtcccaactcatctggctgtctctgtggctttctccacccagctctgatgctgttctttgacaagtttgcaaacatcgtgccctttgactcctgggaccagctcatgaggcagctggacctcacgaaaaatgagatcgatgtggtcagagctggtacagcaggcccaggggatgccttgtatgcaatgctgatgaaatgggtcaacaaaactggacggaacgcctcgatccacaccctgctggrtgccttggagaggatggaagagagacatgcaaragagaagattcaggacctcttggtggactctggaaagttcatctacttasaagatggcacaggctctgccgtgtccttggagtgaaagactctttttaccasaggtttcctcttaggtgttaggagttaatacatattaggtttttttttttttaacatgtatacaaagtaaattcttacaggcgtgagccaccacgcccggccgaggcagaaattttgaagtgaaacccctgtataaagcaagttctctcacagagctaaaaactccataaaaatgagaccaaaaactctgcctattggcacagagagataaacttcccatatatgaataaggataaataagtgccctatgaaaatgaaaaccccagatttcaataggtttagagcctaactatcttacctgcatggtggggaaacaccagagttggcaaatgaaaaccactgttactgaaagtaaagtcagtgggatctccaggaaaacatggcatactaaacgcatgcagttta

SEQ ID NO: 2755 - DNA, 1424 bp, Homo sapiens; identical to SEQ ID NO: 1192
  misc_feature (1391)..(1391): n equals a,t,g, or c
  misc_feature (1406)..(1406): n equals a,t,g, or c
  misc_feature (1415)..(1415): n equals a,t,g, or c

SEQ ID NO: 2756 - DNA, 1375 bp, Homo sapiens; identical to SEQ ID NO: 1083

SEQ ID NO: 2757 - DNA, 2059 bp, Homo sapiens
  misc_feature (2045)..(2045): n equals a,t,g, or c
  misc_feature (2049)..(2049): n equals a,t,g, or c
  misc_feature (2055)..(2055): n equals a,t,g, or c
agcaactctatagatcatagaggaaacggtacctgcagtaccggtccggaattcccgggtcgacccacgcgtscggcactgcatgggaaatagcggccctggaggatgttagacttgctccctctccaagacagcagcagcctgcacctgccccgtgtgtgtggccggcctcctcctcacccttcccggcccccggccaaggacccaggcgctgcatacaggggaggggcgcaccccacagctggggccggttttcctcagctctaggctgttctgtagcttatctgcccctcccccactttcaagacagatgagcaggagcttgggtctctctcggcccctgtctgttcccagcccctgcagattctgagcaaaggccctgggtaagaagggtgggagtggggcctttgccagcagagccagggcagggcgagctgcaggaatcacccctctgcccctgcagctggaatgtgccacagaggccccacctgaagggtggatgtgctggaggggtggcccagagccatactgcgtccaccctgagctcggggacaggtgacagtggctgctctgggaaggggcttttagatgtaacctacaattcagttaggctagagacagatgctggtggaggaagggctgggccaccagggatcacagaccacaggaagatgggaggtggaagcagaggccctgcccccaccccttcctgtctcactcttctgtcttgtccccacccatgcgccttcgtgcctgagaccagggtggccacacaggcagggcctggctccagtctcatcctcccattgcccagtgagccctgctcttctctccccagccccctcccaccgctgcctcgtagagtgacctcggacagagcccccctagcaatacagggaggctcccggggcctggacaggcgggctcggaggctacccgctgtggccggtgccagctgcccttgcagggtgggtgagctctcaggccgagagccttatttacctagtgcaaaaactgtaaaagtgtacagactcttcacagatttttatcttaattgcaagtctgccgattttgtaaatgttcttggtgtttgactgtaatgtaactatctcacctaatggttgtacatatcctttggtcctggtgctgccgagggctggccgggactgctgctctcccaagggttttattttatttctgaatctagagaacagtattgggcaggaggaaaaggcttggtgtctgcggggggtgtcttccctgcctgtggcatttgtgtgttggctttgcagctgctgtctgagtagtggccactggggtgccttcactgggccagtcaacggggggctcctgcccaggccacagagaacctgagttcccgggagctgggccctgcctgcagccagggctggggttgccagaggccctggagggaaggacagtccctgctggggaagaacagccccggggccccctggtcaccgagactcagcctctgctggagaaagccacgccctccctgctagcacagaggcctgactgacttttttgcttaacttccatgttctgggtgatggaaactgccaaacctcctgtcagtgaggactctttccgactgcccagaaagtgggggtggaggaccgaggctacagctccacacgccccggtcccccagagcatctgccccaggtacacctccccctgcgccccgcacgactgcgggagccagactgtccagggaaacagcctctctcttttctacacactcagccacaaagccccccagctcccacaccgcgtcccagctcccctcttttgtaagtatgtgaaaaggaaaaaatgcaaacgttggagtttgggctggagctcctccctccagctgcgacttttaactatgtaataatgtacagaggaagctgttggtgttctaagactctgtgtggctgtgcaatttctgtacatttgcaattagaaatattaaagatttatttagctattttaaaaaaaaaaaaaaaaaaaaaaactcgagggggggcccggtaccnaatncgcccnaaag

SEQ ID NO: 2758 - DNA, 1703 bp, Homo sapiens
  misc_feature (1271)..(1271): n equals a,t,g, or c
gtaaacatggagattattttaatacttctgatattaatggactagcttgttgcagaccactgctccctctgagaactattagaaaagctagacataatatccaaaacagccgcttgaaggcattggaagctagtgaggtagtaaggacttgagaggcttagaatccatagaggagggaagcatagagataagcctgacatttggcattgcttttaccctcaaagcatttgctgatttgcaagtagtggcaaagaaactgagcacaaaagaatggctgagcagcgaagacactgagttgagattgcagcaatcttaacaggtctaaaggaacaaaaaccgaaatctggggacaaccaaagaggaggggccttgataaacacctcaggctttcagttgggactcactctctgagagtttcaacctagtaggaagagtgtaatacacacagatcagccttacaaagactgaaacccagcctccagtccgctcaatcccttcttggatgaaggtgatytgcctyttccttactacttgccaaaagcaaatgtatgccttctcctatatcacatcactctgaacctcaaattatttcttcaagttttcatacccagttatcaagcatacgaagagacatgactacatgaccaaaaatcaaaaggaaaaatatgataagaagagacccatggaagatacagattttggaaagatcaaagacaaacttttacaataactataattagtgaacaagatggagaatttcatcagagaactaaaattgttttttaaaaaagcagcaaattaaattctaaaactgaaaagtacattaactaaaatttaaagctaagtaaatgaataaaacttcaacagatggatttaacagcaggtttaccataactgaagagagcattggtaaattggaaaatagaagaaaatattcaggctaaatcacagagagaacaagggtggaatacacaagaaagaaggtaagacatgtaggagacagtagaaaggtctaattgtataagccctaggaggagagacaagtgagtgtggctgagaatcttctaaaaccaatcaaagatatcgaaccacagattcagaagtactgtgaaccctatgcagtgtaaacagcaagtctggcatgtttaaatgacaagaccagcctggctgtggcgtgggaaacagagaggcaaagttcttggtagtgggattggacgcagtagatcaggccgggccttatgaagagtttagatctaattataattgtaagnattggaggattttaataaggagagacatcatcttctgtaagatcacttttgctgctgtgttagatgaatcacagagaccacttaggtggtttgtgttagttgaagggagaagtgcttatgttttgaatagagttaaaacacataagtggtcattattgtgcagccagttatccaactaaaaatagaggattctgttactatggagtgggggatatggatgattgggatatgactagcattctttctacagagattgaatgaaggaatagatccagcaaacgagagtgaggagttgccagtgaagtaggaataaaaccaggcaattgtggtgccatggaagtttagcgaagaaaatgatgcaacaaaggaggtggagtggccaagtgtgtcacctactactgagatgttgaataagatgaagatcgggagcct

SEQ ID NO: 2759 - DNA, 1946 bp, Homo sapiens
atcttaagggggggaaatctaagggaaacctcttcatataatttctctcgtaatttmatgttcatggacaaaatttctttggcaagatgaattttatagaaactttttataacttgtttaaacttttagctttatcttatctaattcagaacaatcctttaaccctgaacaaaaatgtatattttaacatctgctttttaccaataattgctaagtctgtttttatttctcaatgattagtcatgtgaacttcaatgtaccacagtttttrctttcccttcaaaaaatatttgattcaaaaactmattttcctctaggtcaattagagctttataaaaatagacattacatagatacagcacatatataaatacataggcaaaaaagaatccagtagctataagatgttttgtttcccaatctcctaattagattattggcctctcatgcatgtattaaaagtggaaaaacaaaatggagaaaaagaattcagtcgactgagaatcctttttttcagcaaaacaaggtccaataaaaaaaaaaataaggcctttaaatatacctataacttgggccaggaatggtggctcatgcctgtaatcccagcactttgggaggctgaggcaggtggaacaagaggtcaagggatcgagaccatcctggccaacatggcgaaaccccgtctctactaaaaacmcaaaaattatctgggcatggtggtgtgcacctgtagtaccggccactcgggagggtgaggcaggagaatcacctggacccaggaagcagaggttgcaatgagctgagaccacaccactgcactccagcttggctacagagcgagactcagtctcaaaaaaaaaaaaaaatgtatatatgtgtgtgtgtgtgtgtgtgtgtgtgtgtgtataaaatctgggtatgcacttttagttaagctgaatgtactttaagaaaattcttttaaattccccattacctgctttagctgtgccaagcagccaatatttctggttttcagactttcctaaaagtaactgtacaggtgaaaccaacaagcaccaattaaggttatgatttaactgtgagtttcaaaggggtaagcagttcttacaaaatctattttattattatttttttgagatggagtctttctctgttgcccaggctacagtgcagcgatcttggctcactgcaacctctgcctcccgagctcaagcaattctcccgcctcagcctccgagtaaccgggattacagatgcccaccaccgcacctggccaatttttgtatttttagtagagacggggccccaccatcctggccaggctggtctcgaactcctgacctcatgttccaaccgcctccgcctcccaaagtgctagaattacagacgtgagccatcgcacctggccacaaaatctaaaacctttaaaggcaacttagaaaaaggaaggtttaagataaaactcaagagttgttcatgaagggaagataatcaccaaatggcgaaagtcacacagatatcgacccaaaagtactcattcctttacccaggattgaacccagactgcagaggctaaagcaaaatattgccatgtggttacaggtcacgtccccaaggacataaaacaaaatggaggcctgcagcaaagatccctactgatcaaacaggaagacatgcaaagcacaccagattgtctacagcttatgaccaacttcataatttttttttttataattaaaactttacagagaatatacacagtgatacttggtgtcctggcctagtaaaatgttctctaaaagcagggttgggggggtgggggggactctctcacttaaaagttaacttctgacggggtggactcgtgccgaattcctgcagcccgggggatccactagttctagagcggccgccaccgcggtggagctccagcttttgttccc

SEQ ID NO: 2760 - DNA, 1236 bp, Homo sapiens
  misc_feature (686)..(686): n equals a,t,g, or c
  misc_feature (1172)..(1173): n equals a,t,g, or c
  misc_feature (1236)..(1236): n equals a,t,g, or c
tcgacccacgcgtccgactactttgactaytggggccagggaaccctggtcaccgtctcctcagcctccaccaagggcccatcggtcttccccctggcgccctgctccaggagcacctccgagagcacagcggccctgggctgcctggtcaaggactacttccccgaaccggtgacggtgtcgtggaactcaggcgctctgaccagcggcgtgcacaccttcccrgctgtcctacagtcctcaggactctactccctcagcagcgtggtgaccgtgmcctccagcaacttcggcacccagacctacacctgcaacgtagatcacaagcccagcaacaccaaggtggacaagacagttgagcgcaaatgttgtgtcgagtgcccaccgtgcccagcaccacctgtggcaggaccgtcagtcttcctcttccccccaaaacccaaggacaccctcatgatctcccggacccctgaggtcacgtgcgtggtggtggacgtgagccacgaagaccccgaggtccagttcaactggtacgtggacggcatggaggtgcataatgccaagacaaagccacgggaggagcagttcaacagcacgttccgtgtggtcagcgtcctcaccgtcgtgcaccaggactggctgaacggcaaggagtacaagtgcaaggtctccaacaaaggcctccnagcccccatcgagaaaaccatctccaaaaccaaagggcagccccgagaaccacaggtgtacaccctgcccccatcccgggaggagatgaccaagaaccaggtcagcctgacctgcctggtcaaaggcttctaccccagcgacatcgccgtggagtgggagagcaatgggcagccggagaacaactacaasaccacgcctcccatgctggactccgacggctccttcttcctctayagcaagctcaccgtggacaagagcaggtggcagcaggggaacgtcttctcatgctccgtgatgcatgaggctctgcacaaccactacacgcagaagagcctctccctgtcyccgggtaaatgagtgcsacggccggcaagcccccgctccccrggctctcgsggtcgcrcgaggatgcttggcacgtaccccgtstacatacttcccrggcacccagcatggaaataaagcacccascrctgccctgggcnngmaaaaaaaaaaaaaaaaaaaaaaaaaaaaaaaaaaaaaaaaaaaaaaaaaaaaagaaaaagn

SEQ ID NO: 2761 - DNA, 1270 bp, Homo sapiens
  misc_feature (1174)..(1174): n equals a,t,g, or c
  misc_feature (1240)..(1240): n equals a,t,g, or c
  misc_feature (1265)..(1265): n equals a,t,g, or c
  misc_feature (1268)..(1268): n equals a,t,g, or c
aactctcctgcgcaggttctggattcgcctttagtgactacgctctgcagtgggtccgccaggctccaggcaagggactggagtgggtggcctttatctcatatgaaggaaataataaacaatatgaagactccgtcaagggtcgattctccatctccagagacaattccaacaactccgtgtttctggagatgaacagtctgaaaagtgaggacacggctgtctattactgtgtgagagatagatctggtcgtgggaccgactactttgactactggggccggggaaccctggtcaccgtctcctcggcctccaccaagggcccatcggtcttccccctggcaccctcctccaagagcacctctgggggcacagcggccctgggctgcctggtcaaggactacttccccgaaccggtgacggtgtcgtggaactcaggcgccctgaccagcggcgtgcacaccttcccggctgtcctacagtcctcaggactctactccctcagcagcgtggtgaccgtgccctccagcagcttgggcacccagacctacatctgcaacgtgaatcacaagcccagcaacaccaaggtggacaagaaagttgagcccaaatcttgtgacaaaactcacacatgcccaccgtgcccagcacctgaactcctggggggaccgtcagtcttcctcttccccccaaaacccaaggacaccctcatgatctcccggacccctgaggtcacatgcgtggtggtggacgtgagccacgaagaccctgaggtcaagttcaactggtacgtggacggcgtggaggtgcataatgccaagacaaagccgcgggaggagcagtacaacagcacgtaccgtgtggtcagcgtcctcaccgtcctgcaccaggactggctgaatggcaaggagtacaagtgcaaggtctccaacaaagccctcccagcccccatcgagaaaaccatctccaaagccaaagggcagccccgagaaccacaggtgtacaccctgcccccatcccgggatgagctgaccaagaaccaggtcagcctgacctgcctggtcaaaggcttctatcccagcgacatcgccgtggartgggagagcaatgggcagccggagaacaactacmagaccacgccttccgtgctggacttccgacgggttctttcttncttttacagcaaaggctcaccgtggaccaagaagcaggttggcagcagggggaaaccgtctttttnatgcttccgtggatggcatgaaggnttntg

SEQ ID NO: 2762 - DNA, 507 bp, Homo sapiens
gtgtggtggtgcacmcctgtggttgtagctgctcgagaggctgaggcatgaaatccaagaggttggaggctgcaktgagctgagatccagccactgcactccagcctgggcgacagagtgagactctgttttaaacaaacaaacaaacaaacaaacaaaaacaaaaacattttcttggctaggtgtgaccatgcctgtaattgcagcactttgggaggccgaggtgggaggatcgcttgaggctaggagctccagaccagtctgggcaaataacgagaccttgtctctgctaaaaattaaaaaaataaccagccgagtgtggtggtgtgtgcctgtggtcccagctactcaggagactgagacgggaggatygcttgagctcaggaggttgagactgcagtgagctgtggtcatgccactgcacytcagcctgggtgacagagtgagatccggtctcaaggaaaaccaaaagataaaaataattaaaaaaaaaaaaaaaaaactcga

SEQ ID NO: 2763 - DNA, 2395 bp, Homo sapiens
gagcccacgagaggcagcgccatggcggagcagacctactcgtgggcctattccctggtggattccagtcaagtgtctacatttctgatttccattcttcttatagtctatggtagtttcaggtcccttaatatggactttgaaaatcaagataaggagaaagacagtaatagttcttctgggtctttcaatggcaacagcaccaataatagcatccaaacaattgactctacccaggctctgttccttccaattggagcatctgtctctcttttagtaatgttcttcttctttgactcagttcaagtagtttttacaatatgtacagcagttcttgcaacgatagcttttgcttttcttctcctcccgatgtgccagtatttaacaagaccctgctcacctcagaacaagatttcctttggttgctgtggacgtttcactgctgctgagttgctgtcattctctctgtctgtcatgctcgtcctcatctgggttctcactggccattggcttctcatggatgcactggccatgggcctctgtgtcgccatgatcgcctttgtccgcctgccgagcctcaaggtctcctgcctgcttctctcagggcttctcatctatgatgtcttttgggtatttttctcagcctacatcttcaatagcaacgtcatggtgaaggtggccactcagccggctgacaatccccttgacgttctatcccggaagctccacctggggcccaatgttgggcgtgatgttcctcgcctgtctctgcctggaaaactggtcttcccaagctccactggcagccacttctccatgttgggcatcggagacatcgttatgcctggtctcctactatgctttgtccttcgctatgacaactacaaaaagcaagccagtggggactcctgtggggcccctggacctgccaacatctccgggcgcatgcagaaggtctcctactttcactgcaccctcatcggatactttgtaggcctgctcactgctactgtggcgtctcgcattcaccgggccgcccagcccgcccttctctatttggtgccatttactttattgccactcctcacgatggcctatttaaagggcgacctccggcggatgtggtctgagcctttccactccaagtccagcagctcccgattcctggaagtatgatggatcacgtggaaagtgaccagatggccgtcatagtccttttctctcaactcatggtttgtttcctcttagagctggcctggtactcagaaatgtacctgtgtttaaggaactgccgtgtgactggatttggcattkaaagggagctcgtttgcaggagagaggtgctggagccctgtttggttccttctcttcctgcggatgtagaggtggggccccttccaagagggacaggcctctccccagcgcgccttcctcccacgtttttatggatctgcaccagactgttaccttctgggggagatggagatttgactgtttaaaaactgaaaacagcgaggagtctttctagaacttttgaacactaaaaggatgaaaaaaattagcaaaccgaagtttcttcaatgacccctcgagaactttgggaccagtttcctatgggggactcagtttcagagaactgagacagaagctcttctgtcgttatattcttctttcctttttttggatttattaaatattttctgtggtgtgaagtgacttattaaatccacagacattgagtgacttcttacaacatccacataagaatttgttgtaatgagttcatgtccacccagatgttgtgttggcagtgaacaagggcacggtttttatacatacgtacatatatatatataaacacacacatagatatatatgaataaacaaaaatgaaatcctgctaagatcacgctgtgtagctgacaggggcttgctgtcgttttgagcatgtcgagcagtttactgtggcttccttgtatatggataagctgctgtccttccccttcacaactgaccccgcagttacaaactagtatagcatttgtgctgattgatgatagactcatggacttcaggagcccttacttggttttgatcagtgtagcaaattagggatgaagagttcaaaccttttggccctttctttcttttctaggcttctccctcgcagggtgttccgtagtttcttctcgagccaatgcatgtattatagcagcaggtgtctttgtgctttctcatcatagtaacgtactacttgtaaatacatttttctattttctatttttttgtatttttttttgacattttgtttcattggtgtgctgtatattttccatgccctcactcctttaagaaaaaaaaaaaaaaaggaaaaaagcaamamaaaaaaaaaaaa

SEQ ID NO: 2764 - DNA, 1798 bp, Homo sapiens
ggaaaatcaagataaggagaaagacagtaatagttcttctgggtctttcaatggcaacagcaccaataatagcatccaaacaattgactctacccaggctctgttccttccaattggagcatctgtctctcttttagtaatgttcttcttctttgactcagttcaagtagtttttacaatatgtacagcagttcttgcaacgatagcttttgcttttcttctcctcccgatgtgccagtatttaacaagaccctgctcacctcagaacaagatttcctttggttgctgtggacgtttcactgctgctgagttgctgtcattctctctgtctgtcatgctcgtcctcatctgggttctcactggccattggcttctcatggatgcactggccatgggcctctgtgtcgccatgatcgcctttgtccgcctgccgagcctcaaggtctcctgcctgcttctctcagggcttctcatctatgatgtcttttgggtatttttctcagcctacatcttcaatagcaacgtcatggtgaaggtggccactcagccggctgacaatccccttgacgttctatcccggaagctccacctggggcccaatgttgggcgtgatgttcctcgcctgtctctgcctggaaaactggtcttcccaagctccactggcagccacttctccatgttgggcatcggagacatcgttatgcctggtctcctactatgctttgtccttcgctatgacaactacaaaaagcaagccagtggggactcctgtggggcccctggacctgccaacatctccgggcgcatgcagaaggtctcctactttcactgcaccctcatcggatactttgtaggcctgctcactgctactgtggcgtctcgcattcaccgggccgcccagcccgcccttctctatttggtgccatttactttattgccactcctcacgatggcctatttaaagggcgacctccggcggatgtggtctgagcctttccactccaagtccagcagctcccgattcctggaagtatgatggatcacgtggaaagtgaccagatggccgtcatagtccttttctctcaactcatggtttgtttcctcttagagctggcctggtactcagaaatgtacctgtgtttaaggaactgccgtgtgactggatttggcattgaaagggagctcgtttgcaggagagaggtgctggagccctgtttggttccttctcttcctgcggatgtagaggtggggccccttccaagagggacaggcctctccccagcgcgccttcctcccacgtttttatggatctgcaccagactgttaccttctgggggagatggagatttgactgtttaaaaactgaaaacagcgaggagtctttctagaacttttgaacactaaaaggatgaaaaaaattagcaaaccgaagtttcttcaatgacccctcgagaactttgggaccagtttcctatgggggactcagtttcagagaactgagacagaagctcttctgtcgttatattcttctttcctttttttggatttattaaaatattttctgtggtgtgaagtgacttattaaatccacagacattgagtgacttcttacaacatccacataagaatttgttgtaatgagttcatgtccacccagatgttgtgttggcagtgaacaagggcacggtttttatacatacgtacatatatatatataaacacacacatagatatatatgaataaacaaaaatgaaatcctaaaaaaaaaaaaaaaaaaaaaaaaaaaaaaaaaaaaaa

SEQ ID NO: 2765 - DNA, 1798 bp, Homo sapiens; identical to SEQ ID NO: 2764

SEQ ID NO: 2766 - DNA, 549 bp, Homo sapiens
gacacctctgtcaccatgtggttcctggttctgtgcctcgccctgtccctgggggggactggtgctgcgcccccgattcagtcccggattgtgggaggctgggagtgtgagcagcattcccagccctggcaggcggctctgtaccatttcagcactttccagtgtgggggcatcctggtgcaccgccagtgggtgctcacagctgctcattgcatcagcgacaattaccagctctggctgggtcgccacaacttgtttgacgacgaaaacacagcccagtttgttcatgtcagtgagagcttcccacaccctggcttcaacatgagcctcctggagaaccacacccgycaagcagacgaggactacagccacgacctcatgctgctccgcctgacagagcctgctgataccatcacagacgctgtgaaggtcgtggagttgcccacccaggaacccgaagtggggagcacctgtttggcttccggctggggcagcatcgaaccagagaatttctcatttccagatgatctccagtgtgtggacctcaaa

SEQ ID NO: 2767 - DNA, 764 bp, Homo sapiens
agtcgatcacagcgcgttcgcactcttcagcgccaggcacgcgggtagagagaggawagccagtacagcttgtacacagagtatcatgggaggaggaaccaggcacgttcagagccagtcccagagctgtacaattgcggtgaggttggcattgttcagagctggagctagatgcagagaaggtgccaggaggacagggctggcattgggtgttctgagagggtgtaccaggagcgatcactccagcaccaggaggacaagaagcgtgttccagacaaaatccagcatgagcaaagaagcctgtgcgacacctacatgccctgttgtgtgttgcatgacaagcccttgcttcctcttccctttctccacagagcacgttgcaatacctacagcgctcgagatagttccaaaactgtgtatagtgcctaggagggcaagggccacacgtcgtaggagaatcgcgcctacaaggcctttgcacaaatgttccaggaggacactgagcacacaccagcctttctcctgtttcagcatctctccatggatatgtaggtgtttcagccactccgcgtacagccggcaccggcagcagggcaggcagcgccaacaccaggcacarcagcgacaggcctggcccctccagcgccctcatggtccttgctggagcagggcagagcgcggctcagcgcggacacaggaccctgctgtgcctgaccgacatgccacccggacgcgtgggcggacgcgtgggcggacgcgtgggc

SEQ ID NO: 2768 - DNA, 1179 bp, Homo sapiens; identical to SEQ ID NO: 1701

SEQ ID NO: 2769 - DNA, 1702 bp, Homo sapiens; identical to SEQ ID NO: 357

SEQ ID NO: 2770 - DNA, 675 bp, Homo sapiens
ccccttccccgcaaaaaaaaaacccacaaaagtaatactttcaagaaggtagttttgtttttatttttgctatttaatttttgacatccctcaaaaatggttttcacatcataaamcattggttscagcttaggaacaragtctgtaagttgggttttggggaccagtagttatcctaccccagtccagagtgtacccccatactcctgtgcatgggtgggktggcatgtttcagaagtatattaaaamcacaaaatgttaatttccccttaaamccatgactcatttgttccacacgattaggagtctcttaattggaccttaagaaaagttgagtttgacagagagaatagaagaccacctctaaagatgaagcacttgttgctatatcctggcataagataaaattgtttctagttaaaaattgtttgtagagctgcgtgtggtaggggcacacctgtagttccagctacttaggaggctgcggtgggaggatggcttgagcccaggagtttgaggttacagtgagctataatcacaccactgcattccagctcgggcaacagatctagactctgtctgtaaaaacataaaaaaaaaaaaaaaaggaattcctgcagccaaggggatccactagttctagagcggccgccaccgcggtggagctccagcttt

SEQ ID NO: 2771 - DNA, 707 bp, Homo sapiens
cttgcatgtccgaattatcgatcacttaggatttgcctcggccaagatcggccgagtgtagtctttgctataccactgactgtattgaaaaccaaagtattaagaggggaaacgcccctgtttatatctgtaggggtattttacattcaaaaatgtatgtttttttttcttttcaaaattaaagtatttgggactgaattgcactaagatataacctgcaagcatataatacaaaaaaaaattgcaaaactgtttagaacgctaataaaatttatgcagttataaaaatggcattactgcacagttttaagatgatgcagatttttttacagttgtattgtggtgcagaactggattttctgtaacttaaaaaaaaatccacagttttaaaggcaataatcagtaaatgttattttcagggactgacatcctgtctttaaaaagaaatgaaaagtaaatcttaccacaataaatataaaaaaatcttgtcagttacttttcttttacatattttgctgtgcaaaattgttttatatcttgagttactaactaaccacgcgtgttgttcctatgtgcttttctttcattttcaattctggttatatcaagaaaagaataatctacaataataaacggcatttttttttgaaaaaaaaaaaaaaaactcgaggggggcccggtacccaaatcgccggctagtgatcgta

SEQ ID NO: 2772 - DNA, 805 bp, Homo sapiens
  misc_feature (24)..(24): n equals a,t,g, or c
  misc_feature (37)..(37): n equals a,t,g, or c
  misc_feature (61)..(61): n equals a,t,g, or c
  misc_feature (69)..(69): n equals a,t,g, or c
  misc_feature (72)..(72): n equals a,t,g, or c
  misc_feature (161)..(161): n equals a,t,g, or c
  misc_feature (203)..(203): n equals a,t,g, or c
aggatttttttttttaaaacccgnaattggattgccncccttaaaatttgggttttacccnaatttggnggnatggwtttaaagggggttagagttttgccaaagggggggccctggtttttaaaaaaaaaggttrgcctttatmccggcatgkgccttgncaacttaaatataaggttggggtakgtgtagtctttgctatnccactgactgtattgaaamccaaagtattaagaggggaaacgcccctgtttatatctgtaggggtattttacattcaaaaatgtatgtttttttttcttttcaaaattaaagtatttgggactgaattgcactaagatataacctgcaagcatataatacaaaaaaaaattgcaaaactgtttagaacgctaataaaatttatgcagttataaaaatggcattactgcacagttttaagatgatgcagatttttttacagttgtattgtggtgcagaactggattttctgtaacttaaaaaaaaatccacagttttaaaggcaataatcagtaaatgttattttcagggactgacatcctgtctttaaaaagaaatgaaaagtaaatcttaccacaataaatataaaaaaatcttgtcagttacttttcttttacatattttgctgtgcaaaattgttttatatcttgagttactaactaaccacgcgtgttgttcctatgtgcttttctttcattttcaattctggttatatcaagaaaagaataatctacaataataaacggcatttttttttgaaaaaaaaaaaaaaaaaaaactcgag

SEQ ID NO: 2773 - DNA, 1203 bp, Homo sapiens
  misc_feature (3)..(3): n equals a,t,g, or c
  misc_feature (80)..(80): n equals a,t,g, or c
  misc_feature (83)..(83): n equals a,t,g, or c
tanccctcactaaagggaacaaaagctggagctccaccgcggtggcggccgctctagaactagtggatcccccggtctgnttnaattcggcacgagctctgcgtggggccccctttcttccctggttatacccagtcctccgaggggcccaccttgtctcatggctttaaatatgttgatgatgtttccatttatctccagcctagaactctttcttgctcttcaatccactgcctacctgatttcccatagtgaacaatccaacactgaccttctggttaactgccccacatccagcccatctgcagccattcccgtctcaggtaatggccactccatcttcctgcagctcaagtgggaagccctggagccattccgactcctctcccatctggtgcatcaggaaagactgtgggaactaccttcaaattctctccaggagccaaccacctcctgcccctccactgcgaccacccttgttcaagcctgcattgcctctcacctgcattcgtgcagctacctccagaccctccctcagcttccattattgcatcctttggtctcttcccagcagcatccagagtgatcctttgaaaatctcatttctctgctcaaaaccctcctgaggkttcccatcaccaaggatattaaggataaaaaccacatccttcataccattgtctacctgtgattccctaatcgtgtccctttgctcactccctctggcctcttgctgttccctgaacagcagtctgttccagccacagcagcccctttgccctatgtgcccatccccgtcagccttggcactggctgtcctctctgctgggagtgccctttcttcagatgctctcatgcttcgcttctttgccttgttgacatttggtcaatgtcaccttctcagtgaggcctaccctgacctccctgtaggaaaatgcaactcacctcactcccatgccccgtaccttatattgttttccttgcacttaccaatttctaacaaagcatgtaatatctgtttattataacatatctatattttatggtttatgtttcacgcaacttgaatgtaacctttgtgtgggccgtgggtctttctctgtttccttcactgacgcaccttggattcttagcatggtcccagcacatagtagatgctcaataaacatttgttgagtggaaaaaaaaaaaaaaaaaaaactc

SEQ ID NO: 2774 - DNA, 2648 bp, Homo sapiens; identical to SEQ ID NO: 1829
  misc_feature (36)..(36): n equals a,t,g, or c
  misc_feature (94)..(94): n equals a,t,g, or c
  misc_feature (130)..(130): n equals a,t,g, or c
  misc_feature (2526)..(2526): n equals a,t,g, or c
  misc_feature (2565)..(2565): n equals a,t,g, or c

SEQ ID NO: 2775 - DNA, 1601 bp, Homo sapiens; identical to SEQ ID NO: 2578
  misc_feature (1597)..(1597): n equals a,t,g, or c
  misc_feature (1601)..(1601): n equals a,t,g, or c

SEQ ID NO: 2776 - DNA, 1049 bp, Homo sapiens
ggtcggggacggaagcgcagagcacggaccccgccccctcgcggccccgctcgtgacgtcgcggggggcgccggcctccgcccggccccgagggcaggctctccccggaggctcagccccctctgctccccatgggcaactgccaggcagggcacaacctgcacctgtgtctggcccaccacccacctctggtctgtgccactttgatcctgctgctccttggcctctctggcctgggccttggcagcttcctcctcacccacaggactggcctgcgcagccctgacatcccccaggactgggtctcttttttgagatcttttggccagctgaccctgtgtcccaggaatgggacagtcacagggaagtggcgagggtctcacgtcgtgggcttgctgaccaccttgaacttcggagacggtccagacaggaacaagacccggacattccaggccacagtcctgggaagtcagatgggattgaaaggatcttctgcaggacaactggtccttatcacagccagggtgaccacagaaaggactgcaggaacctgcctatattttagtgctgttccaggaatcctaccctccagccagccacccatatcctgctcagaggagggggctggaaatgccaccctgagccctagaatgggtgaggaatgtgttagtgtctggagccatgaaggccttgtgctgaccaagctgctcacctcggaggagctggctctgtgtggctccaggctgctggtcttgggctccttcctgcttctcttctgtggccttctctgctgtgtcactgctatgtgcttccacccgcgccgggagtcccactggtctagaacccggctctgagggcactggcctagttcccgacttgtttctcaggtgtgaatcaacttcttgggccttggctctgagttggaaaaggttttagaaaaagtgaagagctggaatgtgggggaaaataaaaagcttttttgcccaaaaaaaaaaaaaaaaaaaaaaaaaaaaactcgagggggggtcccggtaacccaatcgtccctc

SEQ ID NO: 2777 - DNA, 793 bp, Homo sapiens
gaattcggcacgagttccaggcgggcagcagctgcaggctgaccttgcagcttggcggaatggactggcctcacaacctgctgtttcttcttaccatttccatcttcctggggctgggccagcccaggagccccaaaagcaagaggaaggggcaagggcggcctgggcccctggcccctggccctcaccaggtgccactggacctggtgtcacggatgaaaccgtatgcccgcatggaggagtatgagaggaacatcgaggagatggtggcccagctgaggaacagctcagagctggcccagagaaagtgtgaggtcaacttgcagctgtggatgtccaacaagaggagcctgtctccctggggctacagcatcaaccacgaccccagccgtatccccgtggacctgccggaggcacggtgcctgtgtctgggctgtgtgaaccccttcaccatgcaggaggaccgcagcatggtgagcgtgccggtgttcagccaggttcctgtgcgccgccgcctctgcccgccaccgccccgcacagggccttgccgccagcgcgcagtcatggagaccatcgctgtgggctgcacctgcatcttctgaatyacctggcccagaagccaggccagcagcccgagaccatcctccttgcacctttgtgccaagaaaggcctatgaaaagtaaacactgacttttgaaagcaaaaaaaaaaaaaaaaaactcgagggggggcccgtacccaattsccctaaagggagcgattacaattactggccgcgtttaaaacggcggg

SEQ ID NO: 2778 - DNA, 565 bp, Homo sapiens
  misc_feature (145)..(145): n equals a,t,g, or c
  misc_feature (543)..(543): n equals a,t,g, or c
  misc_feature (563)..(563): n equals a,t,g, or c
cgggcagcagttgcaggctgactttgcagcttggcggtaatggactggcytcacaacctgactgtttcttcttaccatttccatcttcctggggactgggccagcccaggagccccaaaagcaagaggaaggggcaagggcggcntgggcccctggcccctggccctcaccaggtgccactggacctggtgtcacggatgaaaccgtatgcccgcatggaggagtatgagaggaacatcgaggagatggtggcccagctgaggaacagctcagagctggcccagagaaagtgtgaggtcaacttgcagctgtggatgtccaacaagaggagcctgtctcccctggggctacagcatcaaccacgaccccagccgtatccccgtggacctgccggaggcacggtgcctgtgtctgggctgtgtgaaccccttcaccatgcaggaggaccgcagcatggtgagcgtgccggtgttcagccaggttcctgtgcgccgccgcatatgcccgccactgccccgcacggggccttgccgccagcgtttnaataatgagcaccatacgcnaa

SEQ ID NO: 2779 - DNA, 684 bp, Homo sapiens
gaaagcaggtgtggggtgtgggtgtttgcccccatcttcaccagcttcccctcggtcaataccagttctcccacwggcakccaagcacaccaswtatctgcctcmagccacagacagcggcacagcgctctggacagctccccagggtgctcgtggggcaggacacgcagccatcgccatgttcatagaagccaggcaggcaggtcccacagtcagtatctctgcgggaacagagtagccgtgtgtggcggtgcagggccccgcagtctaggcatggttggcagtagaagggtgaactgctgacacattggctgacctggcactccacaaaccagcctggcttacagccacagcgggtgtcggccactgctgaacagttctccagcgccacctgggaggcctgctcatcacaggcctggcagcgggcacattcagaattatggtggttctcccaggccaagaaggtgtcttggggacacacaaggcaggtggagttgccgcagggctccgtgcaaggggccttcaggtagtgycccgctgggcagcctctgcaacaaaacagaccaatcttcttgtggaagtcaccggcacagtcacacctggggctacgagtgccgccctggcccgggcccccagcagcaccaggaggagcgccgccgccaccgcgcgcagccccgcggccgc

SEQ ID NO: 2780 - DNA, 1767 bp, Homo sapiens; identical to SEQ ID NO: 2509
  misc_feature (1737)..(1737): n equals a,t,g, or c
  misc_feature (1748)..(1749): n equals a,t,g, or c
  misc_feature (1760)..(1760): n equals a,t,g, or c

SEQ ID NO: 2781 - DNA, 1505 bp, Homo sapiens
gaatgtctacgttcgaaacaaagtaatatgaaaatatttaaacagcattacaaaatcctagtttatactagactaccatttaaaaatcatgtttttatataaatgcccaaatttgagatgcattattcctattactaatgatgtaagtacgaggataaatccaagaaactttcaactctttgcctttcctggcctttactggatcccaaaagcatttaaggtacatgttccaaaaactttgaaaagctaaatgtttcccatgatcgctcattcttcttttatgattcatacgttattccttataaagtaagaactttgttttcctcctatcaaggcagctattttattaaatttttcacttagtctgagaaatagcagatagtctcatatttaggaaaactttccaaataaaataaatgttattctctgataaagagctaatacagaaatgttcaagttattttactttctggtaatgtcttcagtaaaatattttctttatctaaatattaacattctaagtctaccaaaaaaagttttaaactcaagcaggccaaaaccaatatgcttataagaaataatgaaaagttcatccatttctgataaagttctctatggcaaagtctttcaaatacgagataactgcaaaatattttccttttatactacagaaatgagaatctcatcaataaattagttcaagcataagatgaaaacagaatattctgtggtgccagtgcacactaccttcccacccatacacatccatgttcactgtaacaaactgaatattcacaataaagcttctgagtaacactttctgattactcatgataaactgacatggctaactgcaagaattaaatcttctatctgagagtaataatttatgatgactcagtggtgccagagtaaagtttctaaaataacattcctctcacttgtaccccactaaaagtattagtctacacattacattgaagttaaacacaaaattatcagtgttttagaaacatgagtccggactgtgtaagtaaaagtacaaacattatttccaccataaagtatgtattgaaatcaagttgtctctgtgtacagaatacatacttattcccatttttaagcatttgcttctgttttccctacctagaatgtcagatgtttttcagttatctccccatttgtcaaagttgacctcaagataacatttttcattaaagcatctgagatctaagaacacaattattattctaacaatgattattagctcattcacttattttgataactaatgatcacagctattatactactttctcgttattttgtgtgcatgcctcatttccctgacttaaacctcactgagagcgcaaaatgcagctttatactttttactttcaattgcctagcacaatagtgagtacatttgaattgaatatataataaatattgcaaaataaaatccatctaaatagaaaaaaaaaaaaaaaaaaaaaaaaactcga

SEQ ID NO: 2782 - DNA, 2815 bp, Homo sapiens; identical to SEQ ID NO: 2511

SEQ ID NO: 2783 - DNA, 1128 bp, Homo sapiens
ggcacgagcctctccgcactcactgctcgcgccgggcgcgctccgccagctccgtgctccccgcgccaccctcctccgggccgcgctccctaagggatggtactgaatttcgccgccacaggagaccggctggagcgcccgccccgcggcctcgcctctcctccgagcagccagcgcctcgggacgcgatgaggaccttggcttgcctgctgctcctcggctgcggatacctcgcccatgttctggccgaggaagccgagatcccccgcgaggtgatcgagaggctggcccgcagtcagatccacagcatccgggacctccagcgactcctggagatagactccgtagggagtgaggattctttggacaccagcctgagagctcacggggtccatgccactaagcatgtgcccgagaagcggcccctgcccattcggaggaagagaagcatcgaggaagctgtccccgctgtctgcaagaccaggacggtcatttacgagattcctcggagtcaggtcgaccccacgtccgccaacttcctgatctggcccccgtgcgtggaggtgaaacgctgcaccggctgctgcaacacgagcagtgtcaagtgccagccctcccgcgtccaccaccgcagcgtcaaggtggccaaggtggaatacgtcaggaagaagccaaaattaaaagaagtccaggtgaggttagaggagcatttggagtgcgcctgcgcgaccacaagcctgaatccggattatcgggaagaggacacgggaaggcctagggagtcaggtaaaaaacggaaaagaaaaaggttaaaacccacctaaagcagccaaccagatgtgaggtgaggatgagccacagccctttcctgggacatggatgtacatggcgtgttacattcctgaacctactatgtacggtgctttattgccagtgtgcggtctttgttctcctccgtgaaaaactgtgtccgagaacactcgggagaacaaagagacagtgcacatttgtttaatgtgacatcaaagcaagtattgtagcactcggtgaagcagtaagaagcttccttgtcaaaaagagagagagagagagagagaactagtctcgagggggggcccggtacccaat

SEQ ID NO: 2784 - DNA, 2313 bp, Homo sapiens
  misc_feature (2297)..(2297): n equals a,t,g, or c
aaacgcacctgtggaggcctctccagaaacagcagaggatccgagctgcgtgtaggcagggcgcgcatgtcaccctggcccgggcgcctggtccgctgctggagataaatggtcgaccccggagggagaggctagtaggggtgttgatgtgaactgattcgcccaagccttgggccgcaaaactgcgaaagaaagcggcaggcagcctctgcatttcccagaagtgcagctggggaactttcccagaccggcccaggggttgctagagggtcagacgtaaaggatccgcctttcctaggcggggtggcccaggccaccacgtgaagcgtcctcgcccctcagacgccggagcaggccgggctcaagaaagaggaaagttgaggacgccccacctcggagaggcggcgcccctgagtaggccaggagcctctcttgcaacttctgccaccgcgggccaccgcggccgcctgatcccgcagaggaaggtcgcggccgtggagcgatgacccgcggcggtccgggcgggcgcccggggctgccacagccgccgccgcttctgctgctgctgctgctgccgctgttgttagtcaccgcggagccgccgaaacctgcaggagtctactatgcaactgcatactggatgcctgctgaaaagacagtacaagtcaaaaatgtaatggacaagaatggggacgcctatggcttttacaataactctgtgaaaaccacaggctggggcatcctggagatcagagctggctatggctctcaaaccctgagcaatgagatcatcatgtttgtggctggctttttggagggttacctcactgccccacacatgaatgaccactacacaaacctctacccacagctgatcacgaaaccttccatcatggataaagtgcaggattttatggagaagcaagataagtggacccggaaaaatatcaaagaatacaagactgattcattttggagacatacaggctatgtgatggcacaaatagatggcctctatgtaggagcaaagaagagggctatattagaagggacaaagccaatgaccctgttccagattcagttcctgaatagtgttggagatctattggatctgattccctcactctctcccacaaaaaacggcagcctaaaggtttttaagagatgggacatgggacattgctccgctcttatcaaggttcttcctggatttgagaacatcctttttgctcactcaagctggtacacgtatgcagccatgctcaggatatataaacactgggacttcaacatcatagataaagataccagcagtagtcgcctctctttcagcagttacccagggtttttggagtctctggatgatttttacattcttagcagtggattgataytgctgcagaccacaaacagtgtgtttaataaaaccctgctaaagcaggtaatacccgagactctcctgtcctggcaaagagtccgtgtggccaatatgatggcagatagtggcaagaggtgggcagacatcttttcaaaatacaactctggcacctataacaatcaatacatggttctggacctgaagaaagtaaagctgaaccacagtcttgacaaaggcactctgtacattgtggagcaaattcctacatatgtagaatattctgaacaaactgatgttctacggaaaggatattggccctcctacaatgttcctttccatgaaaaaatctacaactggagtggctatccactgttagttcagaagctgggcttggactactcttatgatttagctccacgagccaaaattttccggcgtgaccaagggaaagtgactgatacggcatccatgaaatatatcatgcgatacaacaattataagaaggatccttacagtagaggtgacccctgtaataccatctgctgccgtgaggacctgaactcacctaacccaagtcctggaggttgttatgacacaaaggtggcagatatctacctagcatctcagtacacatcctatgccataagtggtcccacagtacaaggtggcctccctgtttttcgctgggaccgtttcaacaaaactctacatcagggcatgscagaggtctacaactttgattttattaccatgaaaccaattttgaaacttgatataaaatgaaggagggagatgacggactagaagactgtaaataagataccaaaggcactattttagctatgtttttcccatcagaattatgcaataaaatatattaatttgtcactttcaaaaaaaaaaaaaaaaaaaaaaaaanttcttgggggggggcc

SEQ ID NO: 2785 - DNA, 1916 bp, Homo sapiens
ggcacgagctcggagaggcggcgcccctgagtaggccaggagcctctcttgcaacttctgccaccgcgggccaccgcggccgcctgatcccgcagaggaaggtcgcggccgtggagcgatgacccgcggcggtccgggcgggcgcccggggctgccacagccgccgccgcttctgctgctgctgctgctgccgctgttgttagtcaccgcggagccgccgaaacctgcaggagtctactatgcaactgcatactggatgcctgctgaaaagacagtacaagtcaaaaatgtaatggacaagaatggggacgcctatggcttttacaataactctgtgaaaaccacaggctggggcatcctggagatcagagctggctatggctctcaaaccctgagcaatgagatcatcatgtttgtggctggctttttggagggttacctcactgccccacacatgaatgaccactacacaaacctctacccacagctgatcacgaaaccttccatcatggataaagtgcaggattttatggaaaagcaagataagtggacccggaaaaatatcaaagaatacaagactgattcattttggagacatacaggctatgtgatggcacaaatagatggcctctatgtaggagcaaagaagagggctatattagaagggacaaagccaatgaccctgttccagattcagttcctgaatagtgttggagatctattggatctgattccctcactctctcccacaaaaaacggcagcctaaaggtttttaagagatgggacatgggacattgctccgctcttatcaaggttcttcctggatttgagaacatcctttttgctcactcaagctggtacacgtatgcagccatgctcaggatatataaacactgggacttcaacatcatagataaagataccagcagtagtcgcctctctttcagcagttacccagggtttttggagtctctggatgatttttacattcttagcagtggattgatactgctgcagaccacaaacagtgtgtttaataaaaccctgctaaagcaggtaatacccgagactctcctgtcctggcaaagagtccgtgtggccaatatgatggcagatagtggcaagaggtgggcagacatcttttcaaaatacaactctggcacctataacaatcaatacatggttctggacctgaagaaagtaaagctgaaccacagtcttgacaaaggcactctgtacattgtggagcaaattcctacatatgtagaatattctgaacaaactgatgttctacggaaaggatattggccctcctacaatgttcctttccatgaaaaaatctacaactggagtggctatccactgttagttcagaagctgggcttggactactcttatgatttagctccacgagccaaaattttccggcgtgaccaagggaaagtgactgatacggcatccatgaaatatatcatgcgatacaacaattataagaaggatccttacagtagaggtgacccctgtaataccatctgctgccgtgaggacctgaactcacctaacccaagtcctggaggttgttatgacacaaaggtggcagatatctacctagcatctcagtacacatcctatgccataagtggtcccacagtacaaggtggcctccctgtttttcgctgggaccgtttcaacaaaactctacatcagggcatgccagaggtctacaactttgattttattaccatgaaaccaattttgaaacttgatataaaatgaaggagggagatgacggactagaagactgtaaataagataccaaaggcactattttagctatgtttttcccatcagaattatgcaataaaatatattaatttgtcactttcaaaaaaaaaaaaaaaaaaaaaaaaaaaaa

SEQ ID NO: 2786 - DNA, 2208 bp, Homo sapiens
ttagggcgaattgggtaccgggccccccctctagttttttttttttttttttagtgaatatggcaaacacagtcaaatttatttagcaccatttcagctaaaagtatcagcttttaacacagctacacgcatccatcaccaccaccaccaccacacaatcaaacaccagtatttcaaacccaaaaaatcagtagctaatttacaaaataaatactgcttttaaaagtagtagtaggaaagttaggttaaaaagctgttgcttggaatttttcagcttagatccaggaaaaattagcaaattgaaaattttaagaaagaccaccatattttattaaagttggatgtgactgccctttgcaattagtgtttcatgcaccagaaaagcataatttctggttgtcaaaacaataacttccttgctagttcaaactatagttatacagctctaaagaaacattaacaatttgtataaatgggttgaaaatgtgattattttctattcaaattaataatgcaaacacgaatacaatgttacttcaaayaattaagaaattttatccagtcgttagctaagtaatgaggtcgagtaatccccagtaacttcctgtgataccaaagggaatgtatgttatctctaatgaagcacacctgggtctgtcatgaactaacaatgtgaaggtgagccctttggcttctgggggattttatttcctctgctgtagaattgaaggactttgtttaaggtgtcttacaaagacttcttgctttgcaaaaacgtgttgggtggagtaagaagtaaatttttaaaggcatttggacttttttyctatctgtagaacagcataattcagaactattccacactgttgttctggaaaaattttcctcatgcaatgtaattgtaatgactgacattaaaaagtctgaaaatgaaacatcaaacaataaaaatgtggtttcaaatctttaaagtgcttgcaatatttgggttaaaaatgatgcaccactaccagttagaatatcccayctttgaattttaagarctaagartctgaraaggggaaaaatgacmaagagattgcattattcacgctattcttccatacatgcattcagtgcacaccaattgaaaagtaaacaccttgaaatactactaagaaagcaaagaaagattattccttccatcaaacaccatacaaaaaccacattatctacacacacacacacacacatacacacatgttgtctcgaatgaatcaaacaaaataaaaaagaccattatgactaaaaacgctgtatgaaccagcatgttttctgtgttccaatgacgcacgtacattctgccttattctaattggtttttcttttctctttccatcacaaggaccactttctgagtttctagttcaatgttgttccaggtattttacaaatcctacttgcttcaaagttacaaggaacatcattccaggcccatttatcttggttataaacaagaacaacacagttttctccctgagagttgtcgggttcattcttatgccagaatactctgcgtgggttaaatggcgtctggtccacccaacgccactgacctttggcattctcatctctaagtccaaggaaataggaaagccgtctatccagaaactgaataataaagttctgctcagcttccgtgctgatggtcatcagatgggcccccatccctgaacagttcctttcactctcagcccacgtcttgttgtcagtaagaggaaaatagcagttggactggaaggctctccagtcaataggacaacagttccaggtgctcccttcagcacttttcagttctgatttctctttgatgcatttgagctttgcatggtgctctaacttgtgcactcctgtgcctctcttacagcgtgaaaagttgtgatgagtcaccaaacaacttgcaataaaacagacactgagaagtaagatgaaaactacagcaataaccgaaggtatcagctggggatgcatgcctccttccagtttactttgaggtttttctagccccattgtctaattagtctcttgttcaatggtcaggacggcaagaatttgttctattttttttcccccagagtatatttctgtggataggggaatatattcagaaatacttgagatcgaacaccaatgttacatattgtagtgagattagaacccacgcgtccg

SEQ ID NO: 2787 - DNA, 2076 bp, Homo sapiens
cggcacgaggtttggtctaagagtgagcagaactgtgttgagatgggagcacatttggttgtgttcaacacagaagcagagcagtggaaggaggcatgcatccccagctgataccttcggttattgctgtagttttcatcttacttctcggtgtctgttttattgcaagttgtttggtgactcatcacaacttttcacgctgtaagagaggcacaggagtgcacaagttagagcaccatgcaaagctcaaatgcatcaaagagaaatcagaactgaaaagtgctgaagggagcacctggaactgttgtcctattgactggagagccttccagtccaactgctattttcctcttactgacaacaagacgtgggctgagagtgaaaggaactgttcagggatgggggcccatctgatgaccatcagcacggaagctgagcagaactttattattcagtttctggatagacggctttcctatttccttggacttagagatgagaatgccaaaggtcagtggcgttgggtgggaccagacgccatttaacccacgccagagtattctggcataagaatgaacccgacaactctcagggagaaaaactgtgttgttcttgtttataaccaagataaatgggcctggaatgatgttccttgtaactttgaagcaagtaggatttgtaaaatacctggaacaacattgaactagaaactcagaaagtggtccttgtgatggaaagagaaaagaaaaaccaattagaataaggcagaatgtacgtgcgtcattggaacacagaaaacatgctggttcatacagcgtttttagtcataatggtcttttttattttgtttgattcattcgagacaacatgtgtgtatgtgtgtgtgtgtgtgtgtagataatgtggtttttgtatggtgtttgatggaaggaataatctttctttgctttcttagtagtatttcaaggtgtttacttttcaattggtgtgcactgaatgcatgtatggaagaatagcgtgaataatgcaatctctttgtcatttttccccttctcagactcttagctcttaaaattcaaagatgggatattctaactggtagtggtgcatcatttttaacccaaatattgcaagcactttaaagatttgaaaccacatttttattgtttgatgtttcattttcagactttttaatgtcagtcattacaattacattgcatgaggaaaatttttccagaacaacagtgtggaatagttctgaattatgctgttctacagatagaaaaaaagtccaaatgcctttaaaaatttacttcttactccacccaacacgtttttgcaaagcaagaagtctttgtaagacaccttaaacaaagtccttcaattctacagcagaggaaataaaatcccccagaagccaaagggctcaccttcacattgttagttcatgacagacccaggtgtgcttcattagagataacatacattccctttggtatcacaggaagttactggggattactcgacctcatctacttagctaacgactggataaaatttcttaattatttgaagtaacattgtattcgtgtttgcattattaatttgaatagcaaataatcacattttcaacccatttatacaaattgttaatgtttctttagagctgtataactatagtttgaactagcaaggaagttattgttttgacaaccagaaattatgcttttcctggtgcatgaaacattaattgcaaagggcagtcacatccaactttaataaaatatggtggtctttcttaaaattttcaatttgctaatttttcctggatctaagctgaaaaattccaagcaacagctttttaacctaactttcctactactacttttaaaagcagtatttattttgtaaattagctactgattttttgggtttgaaatactggtgtttgattgtgtggtggtggtggtggtgatggatgcgtgtagctgtgttaaaagctgatacttttagctgaaatggtgctaaataaatttgactgtgtttgccatattcactaaaaaaaaaaaaaaaaaa

SEQ ID NO: 2788 - DNA, 2059 bp, Homo sapiens
cggcacgaggtttggtctaagagtgagcagaactgtgttgagatgggagcacatttggttgtgttcaacacagaagcagagcagtggaaggaggcatgcatccccagctgataccttcggttattgctgtagttttcatcttacttctcggtgtctgttttattgcaagttgtttggtgactcatcacaacttttcacgctgtaagagaggcacaggagtgcacaagttagagcaccatgcaaagctcaaatgcatcaaagagaaatcagaactgaaaagttgctgaagggagcacctggaactgttgtcctattgactggagaaccttccagttccaactgctattttcctccttactgacaacaagacgtgggctgagagttgaaaggaactgttcagggatgggggcccatctgatgaccatcagcacggaagctgagcagaactttattattcagtttctggatagacggctttcctatttccttggacttagagatgagaatgccaaaggtcagtggcgttgggtgggaccagacgccatttaacccacgccagagtattctggcataagaatgaacccgacaactytcagggagaaaactgtgttgttctggtcttataaccaagataaatgggcctggaatgatgttccttgtaactttgaagcaagtaggatttgtaaaatacctggaacaacattgaactagaaactcagaaagtggtccttgtgatggaaagagaaaagaaaaaccaattagaataaggcagaatgtacgtgcgtcattggaacacagaaaacatgctggttcatacagcgtttttagtcataatggtcttttttattttgtttgattcattcgagacaacatgtgtgtatgtgtgtgtgtgtgtgtgtagataatgtggtttttgtatggtgtttgatggaaggaataatctttctttgctttcttagtagtatttcaaggtgtttacttttcaattggtgtgcactgaatgcatgtatggaagaatagcgtgaataatgcaatctctttgtcattttttcccctttctcagactcttagctcttaaaattcaaaagatgggatattctaactggtagtggtgcatcatttttaacccaaatattgcaagcactttaaagatttgaaaccacatttttattgtttgatgtttcattttcagactttttaatgtcagtcattacaattacattgcatgaggaaaatttttccagaacaacagtgtggaatagttctgaattatgctgttctacagatggaaaaaagtccaaatgcctttaaaaatttacttcttactccacccaacacgtttttgcaaagcaagaagtctttgtaagacaccttaaacaaagtccttcaattctacagcagaggaaataaaatcccccagaagccaaagggctcaccttcacattgttagttcatgacagacccaggtgtgcttcattagagataacatacattccctttggtatcacaggaagttactggggattactcgacctcattacttagctaacgactggataaaatttcttaattgtttgaagtaacattgtattcgtgtttgcattattaatttgaatagaaaataatcacattttcaacccatttatacaaattgttaatgtttctttagagctgtataactatagtttgaactagcaaggaagttattgttttgacaaccagaaattatgcttttctggtgcatgaaacactaattgcaaagggcagtcacatccaactttaataaaatatggtggtctttcttaaaattttcaatttgctaatttttcctggaaacctaactttcctactactacttttaaaagcagtatttattttgtaaattagctactgattttttgggtttgaaatactggtgtttgattgtgtggtggtggtggtggtgatggatgcgtgtagctgtgttaaaagctgatacttttagctgaaatggtgctaaataaatttgactgtgtttgccatattcactaaaaaaaaaaaaaaaaaactagaggggggg

SEQ ID NO: 2789 - DNA, 755 bp, Homo sapiens
  misc_feature (9)..(9): n equals a,t,g, or c
  misc_feature (19)..(19): n equals a,t,g, or c
  misc_feature (27)..(27): n equals a,t,g, or c
gcacgggantactggaacngcacttcncgacactatagawggtacscctscaggtaccggyccggaattcccgggtcgacccacgcgtccgggcacaggggatggtgtgcattcagagcattgggttgggggcttccctgttccctcagccccagtcgagaggaaagagaatcgggccactgccagaaagagagtcaagcaaacctggaagggcaaatctgagagtgggaaggccaaaggccgaggcccagatttagtattcactagcagcgccttcgggtagcaggatgattccttttcctgcctgtctgctgctggctctcttccctaaggtacaggttggcaggaccacctccgcctacttctccaccatccctagcatgccagcccgttcccagatcaacctgccagtggagtcaggcagtgcactcctggagccaagagggaagggcagggtagagagggtatgtccagtagcctggagctccatggtggcttcatgcctcccttctcccagctcaggtggccctgagggctccctcggaacagtgcctcaaatcctgacccaagggccagcatggggaagagatggttgcaggcaaaatgcactttatagagattttctattgctgggaaggtgtgtttctcccacaatttgtttgtgaatattcacttgttttataaatgtctgacctgtcttgaraaaaaaaaaaaaaaaaaaaaaaaaaaaaaaaaaaaaaaaaaagggcggccgc

SEQ ID NO: 2790 - DNA, 1401 bp, Homo sapiens
  misc_feature (1401)..(1401): n equals a,t,g, or c
cgcgtcttctggctgccgcacaacatggacttccgcggccgcacctacccctgcccgccgcacttcaaccacctgggcagcgacgtggcgcgggccctgctggagttcgcccagggccgcccgctcggcccgcacggcctggattggctcaagatccacctggtcaatctcacggggttgaagaagcgggagccgctgcggaagcgcctggcctttgcggaggaggtgatggatgacatcctggactccgcggaccaacccttgacgggccgaaagtggtggatgggcgcggaggaaccctggcagacgctggcctgctgtatggaggtggcgaacgctgtgcgcgcctccgaccctgccgcctatgtctcccacctccccgtccatcaggacggctcttgcaacggcctgcagcattatgctgctctgggccgcgacagcgtgggcgccgcctccgtcaacctggagccctcggatgtgccgcaggacgtgtacagcggcgtggccgcgcaggtggaggtgttccgtaggcaggacgcccagcggggcatgcgggtggcacaggtgctggaaggtttcatcacccgcaaggtggtgaagcagacggtgatgacggtggtgtacggggtcacgcgctatggcgggcgcctgcagattgagaagcgcctccgggagctgagcgactttccccaggagttcgtgtgggaggcctctcactatctcgtacgccaggtcttcaagagtctacaggagatgttctcggggacccgggccatccagcactggctgaccgagagtgcccgcctcatctcccacatgggctctgtggtggagtgggtcacacccctgggcgtccccgtcatccagccctatcgcctggactccaaggtcaagcaaataggaggtggaattcagagcatcacctacacccacaacggagacatcagccgaaagcccaacacacgtaagcagaagaacggcttcccgcccaacttcatccactcgctggactcctcccacatgatgctcaccgccctgcactgctacaggaagggcctgaccttcgtctctgtgcacgactgttactggactcacgcagctgatgtctccgtcatgaaccaggtgtgccgggagcagtttgtccgcttgcacagcgagcccatcctgcaggacctgtccagattcctggtcaagcggttctgctctgagccccagaagatcttggaggccagccagctgaaggagacactgcaggcggtgcccaagccaggggccttcgacctggagcaggtgaagcgttccacctacttcttcagctgacaccccgtgagccttgtcagtgtgtaaataaagctcttttgccacccccaaaaaaaaaaaaaaaaaawaaaaaaaaaaaan

SEQ ID NO: 2791 - DNA, 1248 bp, Homo sapiens
  misc_feature (25)..(25): n equals a,t,g, or c
  misc_feature (65)..(65): n equals a,t,g, or c
  misc_feature (101)..(101): n equals a,t,g, or c
  misc_feature (167)..(167): n equals a,t,g, or c
  misc_feature (175)..(175): n equals a,t,g, or c
accaaagcctcgaaaatttaacccntcattaaagggaaccaaaaagctggaagcttccaccgcgnttgccggcccgcttcctagaactaagtggatccccnggggctgcaggaattcggcacgagccgcggaccaaacccttgacggccgaaagtggtggatgggcncgaagganccctggcagacgctggcctgctgtatggaggtggcgaacgctgtgcgcgcctccgaccctgccgcctatgtctcccacctccccgtccatcaggacggctcttgcaacggcctgcagcattatgctgctctgggccgcgacagcgtgggcgccgcctccgtcaacctggagccctcggatgtgccgcaggacgtgtacagcggcgtggccgcgcaggtggaggtgttccgtaggcaggacgcccagcggggcatgcgggtggcacaggtgctggaaggtttcatcacccgcaaggtggtgaagcagacggtgatgacggtggtgtacggggtcacgcgctatggcgggcgcctgcagattgagaagcgcctccgggagctgagcgactttccccaggagttcgtgtgggaggcctctcactatctcgtacgccaggtcttcaagagtctacaggagatgttctcggggacccgggccatcyagcactggctgaccgagagtgcccgcctcatctmccacatgggctctgtggtkgagtgggtcacacccctgggcgtccccgtcatccagccctatcgcctggactccaaggtcaagcarataggaggtggaawtcagagcatcacctacacccacaacggagacatcagccgaaagcccaacacacgtaagcagaagaacggcttcccgcccaacttcatccactcgctggactcctcccacatgatgctcaccgccctgcactgctacaggaagggcctgaccttcgtctctgtgcacgactgttactggactcacgcagctgatgtctccgtcatgaaccaggtgtgccgggagcagtttgtccgcttgcacagcgagcccatcctgcaggacctgtccagattcctggtcaagcggttctgctctgagccccagaagatcttggaggccagccagctgaaggagacactgcaggcggtgcccaagccaggggccttcgacctggagcaggtgaagcgttccacctacttcttcagctgacaccccgtgagccttgtcagtgtgtaaataaagctcttttgccaccccca

SEQ ID NO: 2792 - DNA, 866 bp, Homo sapiens
  misc_feature (596)..(596): n equals a,t,g, or c
  misc_feature (631)..(631): n equals a,t,g, or c
  misc_feature (654)..(654): n equals a,t,g, or c
  misc_feature (752)..(752): n equals a,t,g, or c
  misc_feature (774)..(774): n equals a,t,g, or c
  misc_feature (857)..(857): n equals a,t,g, or c
tcgacccacgcgtccggtctgtgcattagtgtccttgtctgtatctgaggataaaaacactgcctttctcatagggttgatgcaaggattaaatgagtgaacatttaaaatccttagaacacagcctgacacataaaaggygcttgataacggytagccaagattatgttktataattatttcttggcattctcccctctgggctgtgagctgcttcctgtattgtgcctggctgtagcttttttaataaccaattgctgaatsaatgaatgagagaaagaaaaaggggccgggtgtgttggctcacacctgtaatcccattactgtgggaggctgagatgggtggatcacctgaggtcgggagtttgagaccagcctggtcaacatggtgaaactccatctctattaaaaatacaaaaattagctgggcatggtggtggrcacctgtaatcccagctacttgggtggctgaagcaagagaatcacttgaatctggcaggtggaggttgcagtgagctgagatcacgccattgcactccagcctgggcaacatgagtgaaactccgcctcaaaaaaaaaaaaaaaagggcggccgntctagaggatccaagcttacgtacgcgtgcatgcnacgtcatagctcttctatagtgncacctaaattcaattcactggccgtcgttttacaacgtcgtgactgggaaaaccctggcgttacccaacttaatcgccttgcagcacatccccctttngccagctggcgtaatagcgaanaggcccgcaccgatcgcccttcccaacagttgcgcagcctgaatggcgaatgggacgcgccctgtagcggcgcattaagcgcngcggtgcgg

SEQ ID NO: 2793 - DNA, 2473 bp, Homo sapiens
  misc_feature (2403)..(2403): n equals a,t,g, or c
gacaggatctaccccctctgcagcccttcaagaagaggtatgattgctaccacttttccccacaaagtgacgaaaggaaacagcgacggaagcgcaaccgaaccctggaattggtgtctcgactggtccattcccggcccacccccattaaccggctcgagccactcccaggacgaagtcaaggcctcggaaggcgactacaactcccagcaggtcgagcagctccgcccgcgctgattctccattggccttccgggggtggggattagatgggaggtggccgtggggctgcggccgggatttgtcccctcttcggcttccgtagaggaagtggcgcggaccttcatttggggtttcggttcccccccttccccttccccggggtctgggggtgacattgcaccgcgcccctcgtggggtcgcgttgccaccccacgcggactccccagctggcgcgcccctcccatttgcctgtcctggtcaggcccccaccccccttcccacctgaccagccatgggggctgcggtgtttttcggctgcactttcgtcgcgttcggcccggccttcgcgcttttcttgatcactgtggctggggacccgcttcgcgttatcatcctggtcgcaggggcatttttctggctggtctccctgctcctggcctctgtggtctggttcatcttggtccatgtgaccgaccggtcagatgcccggctccagtacggcctcctgatttttggtgctgctgtctctgtccttctacaggaggtgttccgctttgcctactacaagctgcttaagaaggcagatgaggggttagcatcgctgagtgaggacggaagatcacccatctccatccgccagatggcctatgtttctggtctctccttcggtatcatcagtggtgtcttctctgttatcaatattttggctgatgcacttgggccaggtgtggttgggatccatggagactcaccctattacttcctgacttcagcctttctgacagcagccattatcctgctccataccttttggggagttgtgttctttgatgcctgtgagaggagacggtactgggctttgggcctggtggttgggagtcacctactgacatcgggactgacattcctgaacccctggtatgaggccagcctgctgcccatctatgcagtcactgtttccatggggctctgggccttcatcacagctggagggtccctccgaagtattcagcgcagcctcttgtgtaaggactgactacctggactgatcgcctgacagatcccacctgcctgtccactgcccatgactgagcccagccccagcccgggtccattgcccacattctctgtctccttctcgtcggtctaccccactacctccagggttttgctttgtccttttgtgaccgttagtctctaagctttaccaggagcagcctgggttcagccagtcagtgactggtgggtttgaatctgcacttatccccaccacctggggacccccttgttgtgtccaggactccccctgtgtcagtgctctgctctcaccctgcccaagactcacctcccttcccctctgcaggccgacggcaggaggacagtcgggtgatggtgtattctgccctgcgcatcccacccgaggactgagggaacctaggggggacccctgggcctggggtgccctcctgatgtcctcgccctgtatttctccatctccagttctggacagtgcaggttgccaagaaaagggacctagtttagccattgccctggagatgaaattaatggaggctcaaggatagatgagctctgagtttctcagtactccctcaagactggacatcttggtctttttctcaggcctgagggggaaccatttttggtgtgataaataccctaaactgcctttttttcttttttgaggtggggggagggaggaggtatattggaactcttctaacctccttgggctatattttctctcctcgagttgctcctcatggctgggctcatttcggtccctttctccttggtcccagaccttgggggaaaggaaggaagtgcatgtttgggaactggcattactggaactaatggttttaacctccttaaccaccagcatccctcctctccccaaggtgaagtggagggtgctgtggtgagctggccactccagagctgcagtgccactggaggagtcagactaccatgacatcgtagggaaggaggggagatttttttgtagtttttaattggggtgtgggaggggcggggaggttttctataaactgtatcattttctgctgagggtggagtgtcccatccttttaatcaaggtgattgtgattttgactaataaaaaagaatttgtaaaaaaaaaaaaaaaaaaaaaaaaaaaanaagggcggccgctctagaggatccctcgaggggcccaagcttacgcgtgcatgcgacgtcatagctctac

SEQ ID NO: 2794 - DNA, 1461 bp, Homo sapiens
  misc_feature (30)..(30): n equals a,t,g, or c
  misc_feature (40)..(40): n equals a,t,g, or c
  misc_feature (590)..(590): n equals a,t,g, or c
ccggccctttaatttaaaagtacgcctgcngtgtcgcgcntccggaaattcccgggtcgacccacgcgtccggggccgttggctccagacaaataaacatggagtccatcttccacgagaaacaagaaggctcactttgtgctcaacattgcctgaataacttattgcaaggagaatattttagccctgtggaattatcctcaattgcacatcagctggatgaggaggagaggatgagaatggcagaaggaggagttactagtgaagattatcgcacgtttttacagcagccttctggaaatatggatgacagtggttttttctctattcaggttataagcaatgccttgaaagtttggggtttagaactaatcctgttcaacagtccagagtatcagaggctcaggatcgatcctataaatgaaagatcatttatatgcaattataaggaacactggtttacagttagaaaattaggaaaacagtggtttaacttgaattctctcttgacgggtccagaattaatatcagatacatatcttgcacttttcttggctcaattacaacaggamggttattctatatttgtngttaagggtgatctgccagattgcgamgctgaccaactcctgcagatgattagggtccaacagatgcatcgaccaaaacttattggagaagaattagcacwactaawagagcamagagtccataaaacagacctggaacgaatgttagaagcaaatgatggctcaggaatgttagacgaagatgaggaggatttgcagagggctctggcactaagtcgccaagaaattgacatggaagatgaggaagcagatctccgcagggctattcagctaagtatgcaaggtagttccagaaacatatctcaagatatgacacagacatcaggtmcaaatcttwcttcagaagagcttcggaagagacgagaagcctactttgaaaaacagcagcaaaagcagcaacagcagcarmagcagcarcagcagcagcagcagcagcagcagggggacctatcaggacagagttcacatccatgtgaaaggccagccaccagttcaggagcacttgggagtgatctaggtgatgctatgagtgaagaagacatgcttcaggcagctgtgaccatgtctttagaaactgtcagaaatgatttgaaaacagaaggaaaaaaataatacctttaaaaaataatttagatattcatactttccaacattatcctgtgtgattacagcatagggtccactttggtaatgtgtcaaagagatgaggaaataagacttttagcggtttgcaaacaaaatgatgggaaagtggaacaatgcgtcggttgtaggactaaataatgatcttccaaatattagccaaagaggcattcagcaattaaagacatttaaaatagtttaaaaaaaaaaaaaaaaaaagggcggccgc

SEQ ID NO: 2795 - DNA, 579 bp, Homo sapiens
taagtatgcaaggtagttccagaacatatctcaagtwtgacacagacatcaggtacaatcttacttcmgaagagcttcggaagagacgagaagcctactttgaaaaacagcagcaaaagcagcaacagcagcagcagcagcagcagcagggggacctatcaggacagagttcacatccatgtgaaaggccagccaccagttcaggagcacttgggagtgatctaggtgatgctatgagtgaagaagacatgcttcaggcagctgtgaccatgtctttagaaactgtcagaaatgatttgaaaacagaaggaaaaaaataatacctttaaaaaataatttagatattcatactttccaacattatcctgtgtgattacagcatagggtccactttggtaatgtgtcaaagagatgaggaaataagacttttagcggtttgcaaacaaaatgatgggaaagtggaacaatgcgtcggttgtaggactaaataatgatcttccaaatattagccaaagaggcattcagcaattaaagacatttaaaatagtttaaaaaaaaaaaaaaaaaaagggcggccgc

SEQ ID NO: 2796 - DNA, 692 bp, Homo sapiens; identical to SEQ ID NO: 1110

SEQ ID NO: 2797 - DNA, 735 bp, Homo sapiens
tcgacccacgcgtccgcaaggaagtctggtggccgttgagcacttgggggttgttttgtgtttggaatcagtctgatttcagctagtcatggctgctggtgggtgcctccttcttcttgccttctttccattgtctagagggagccatttccacttgcagaagcgagcccttgcagaggcatcttttgaagcaactctgtgtgagttgtttgtcatagaaactgctagcaagggaactctgctaataataactattaggcacctagtaacctatattatagtaatatttaagtgccatatgcttaaaaatgaaatgaattcaagtataaaacctcatttccagtgatacatattttttatccagaagaattgaacttgataaacttgtctaaagtggaaggacaatctaactggacattgtttttaaggtcatagtctttaaggtcaaattaagtatgagactcaagttcagtgatttcttccttcctcactgcttccttctccctttcccatcttgacttctggaatagcccttgccaaataccagggatcatactgcataaactagattttcagtgtctgcatgttttctakataacatctcctttaaagcattggcttttctttaaggagatctgctgagattctgctccctcaagctagcacgctaactggtatctacaaaaaaaaaaaaaaagggcggccgctctagaggatccaagtcttcacgtcacg

SEQ ID NO: 2798 - DNA, 857 bp, Homo sapiens
  misc_feature (783)..(783): n equals a,t,g, or c
gccctcccctcactctctgttctgctttcatttcttggagtttcactagatatctcatataagtggaatcataaggtatttgtctttttgtgattggcttatttcatttagcataatgtcctcaaggttcattcatgttgttgcatgtaatagaatttcctttctttttaagggtgaataatatttcattttgtgtgttgagaggtaggacctttaaaatgattatgtcatgagggctctgccctcgtgaatgaattaatgacattaccatgggagtgggttcctgataaaagaatttggctcctttctctcactcttgtgcatgctctcttgcccttatgtcttttgccatgggatgttggagcaagaagtccctcatcagtggtgagcccatcaaccttggatttcccaacctccagaactgtaaataaatttctttttaaattacccagtctttggtattctgttatagcaacacaaaatggactaaaacagaagattagagagactttcctctttgtacagttttctcaaatgccaaggtggcataaattggaatagtgtgtcctgaatctcattagagattcctcatggttgctctatgctatgccatgtagggagagaggggcacaaacaggtgtgcgacatgccacaagttttcctcctcctttcacaggaatactgtcttggttacaatggcctaggtgctattgcttcacagctagtctctatagttttgttttttaagagatgaggtttcactccagcctgggggacaagagncgagattcgtctcaaaaaaaaaaaaaaaaaaaaaaaaaaaaaagggcggccgctcttagtaggatcccaagtct

SEQ ID NO: 2799 - DNA, 838 bp, Homo sapiens
cccacgcgtccgccctcccctcactctctgttctgctttcatttcttggagtttcactagatatctcatataagtggaatcataaggtatttgtctttttgtgattggcttatttcatttagcataatgtcctcaaggttcattcatgttgttgcatgtaatagaatttcctttctttttaagggtgaataatatttcattttgtgtgttgagaggtaggacctttaaaatgattatgtcatgagggctctgccctcgtgaatgaattaatgacattaccatgggagtgggttcctgataaaagaatttggctcctttctctcactcttgtgcatgctctcttgcccttatgtcttttgccatgggatgttggagcaagaagtcccttcatcagtggtgagcccatcaaccttggatttcccaacctccagaactgtaaataaatttctttttaaattacccagtctttggtattctgttatagcaacacaaaatggactaaaacagaagattagagagactttcctctttgtacagttttctcaaatgccaaggtggcataaattggaatagtgtgtcctgaatctcattagagattcctcatggttgctctatgctatgccatgtagggagagaggggcacaaacaggtgtgcgacatgccacaagttttcctcctcctttcacaggaatactgtcttggttacaatggcctaggtgctattgcttcacagctagtctctatagttttgttttttaagagatgaggtttcactccagcctgggggacaagagtcgagattcgtctcaaaaaaaaaaaaaaaaaaaaaaaaaaaaaa

SEQ ID NO: 2800 - DNA, 3117 bp, Homo sapiens
ggtgataatgaaagtggtggtggtgatggtggtaatactggtggtggtgacattggtggtggtggtgatggtggtgatactggtgatggtggtgatggtggtggcgctggtgaccctgacatggggtccagtagcagtgacagtggatgcaggctcctggtgactgaggagcatctcaggctgaggaggcacctctgatccccgccactgctccttaccccctacagtctctcagcaaacctgctgggcgacagcggactcagatgccttctggaatgtctgccgcagtgcccatctccggtttgcttgatctgagtcacaacagcatttctcaggaaagtgccctgtacctgctggagacactgccctcctgcccacgtgtccgggaggcctcagtgaacctgggctctgagcagagcttccggattcacttctccagagaggaccaggctgggaagacactcaggctaagtgagtgcagcttccggccagagcacgtgtccaggctggccaccggcttgagcaagtccctgcagctgacggagctcacgctgacccagtgctgcctgggccagaagcagctggccatcctcctgagcttggtggggcgacccgcagggctgttcagcctcagggtgcaggagccgtgggcggacagagccagggttctctccctgttagaagtctgcgcccaggcctcaggcagtgtcactgaaatcagcatctccgagacccagcagcagctctgtgtccagctggaatttcctcgccaggaagagaatccagaagctgtggcactcaggttggctcactgtgaccttggagcccaccacagccttcttgtcgggcagctgatggagacatgtgccaggctgcagcagctcagcttgtctcaggttaacctctgtgaggacgatgatgccagttccctgctgctgcagagcctcctgctgtccctctctgagctgaagacatttcggctgacctccagctgtgtgagcaccgagggcctcgcccacctggcatctggtctgggccactgccaccacttggaggagctggacttgtctaacaatcaatttgatgaggagggcaccaaggcgctgatgagggcccttgaggggaaatggatgctaaagaggctggacctcagtcaccttctgctgaacagctccaccttggccttgcttactcacagactaagccagatgacctgcctgcagagcctcagactgaacaggaacagtatcggtgatgtcggttgctgccacctttctgaggctctcagggctgccaccagcctagaggagctggacttgagccacaaccagattggagacgctggtgtccagcacttagctaccatcctgcctgggctgccagagctcaggaagatagacctctcagggaatagcatcagctcagccgggggagtgcagttggcagagtctctcgttctttgcaggcgcctggaggagttgatgcttggctgcaatgccctgggggatcccacagccctggggctggctcaggagctgccccagcacctgagggtcctacacctaccattcagccatctgggcccaggtggggccctgagcctggcccaggccctggatggatccccccatttggaagagatcagcttggcggaaaacaacctggctggaggggtcctgcgtttctgtatggagctcccgctgctcagacagatagacctggtttcctgtaagattgacaaccagactgccaagctcctcacctccagcttcacgagctgccctgccctggaagtaatcttgctgtcctggaatctcctcggggatgaggcagctgccgagctggcccaggtgctgccgcagatgggccggctgaagagagtggacctggagaagaatcagatcacagctttgggggcctggctcctggctgaaggactggcccaggggtctagcatccaagtcatccgcctctggaataaccccattccctgcgacatggcccagcacctgaagagccaggagcccaggctggactttgccttctttgacaaccagccccaggccccttggggtacttgatggccccctcaagacctttggaatccagccaagtgatgcacccaaatgatccacctttcgcccactgggataawtgactcaggaaagaagagcctcggcagggcgctctgcactccacccaggaggaaggatacgtgtgtcctgctgcagtcctcagggagaacttttttgggaaccaggagctgggtctggacaaaggagtaccctgcattacgtgggatatgtgtgatcaattggggacatgcgacacacaatgagggtgtcatgacaatgcatgacacgtacggttatatgtggcagtgtgaccccttgacatgtggcgttacatgaaagtcagtgtggcacgtgttctgtggcatgggtgctggcatcccaagtrgcaggatacatgattgttggtctatatatgacacatgacaaatgtccatgtcacaggactcatggctggccagatgacctcaggctggcccaagatctaatttattaatttttaaagcaaatacatatttatagattgtgtgtatggagcagctaagtcaggaaaagtcttccgcccgagctgggaggggagagtgtccatgcactgaccagtccaggggctcaagggccagggctctggaacaagccagggactcagccattaagtcccctcctgcctcaatcctcagcctacccatctataaacttgatgactcctcccttacttacatactagcttccaaggacaggtggaggtagggccagcctggcgggagtggagaagcccagtctgtcctatgtaagggacaaagccaggtctaatggtactgggtagggggcactgccaagacaataagctaggctactgggtccagctactactttggtgggattcaggtgagtctccatgcacttcacatgttacccagtgttcttgttacttccaaggagaaccaagaatggctctgtcacactcgaagccaggyttgatcaataaacacaatggtattccaaaaaaaaaaaaaaaaaaaaaaaaaaaaaaaaaaaaaaactcgag

SEQ ID NO: 2801 - DNA, 1552 bp, Homo sapiens
  misc_feature (1535)..(1535): n equals a,t,g, or c
cgctgccgatcgccgggaggacccccgcctcgccgaagacgggcggggcaagccgagcctcacggggtccccggagctgggccgggcctccagatggagaaggcgcaacggggagttcttgagtaagccagagcggtgtccagcgcggtgtagccgcagccgccgctgtcaggcgcagcaacggrcaaccccgtagaagtcggtcggcaggtcctctccaacccgccgctaccgcgccgctgtgggagagaccccagcaggagcccaarggcagctacgggggcgcgaaggccgctggcgccgcctcggccagcccttcccgcgcggttccactgccttaaggatgacagtcgtagggaaccctcgaagttggagctgccagtggttgccaatcctgatactgttgctgggcacaggccatgggccaggggtggaaggcgtgacacactacaaggccggcgaccctgttattctgtatgtcaacaaagtgggaccctaccataaccctcaggaaacttaccactactatcagcttccagtctgctgccctgagaagatacgtcacaaaagccttagcctgggtgaagtgctggatggggaccgaatggctgagtctttgtatgagatccgctttcgggaaaacgtggagaagagaattctgtgccacatgcagctcagttctgcacaggtggagcagctgcgccaggccattgaagaactgtactactttgaatttgtggtagatgacttgccaatccggggctttgtgggctacatggaggagagtggtttcctgccacacagccacaagataggactctggacccatttggacttccacctagaattccatggagaccgaattatatttgccaatgtttcagtgcgggacgtcaagccccacagcttggatgggttacgacctgacgagttcctaggccttacccacacttatagcgtgcgctggtctgagacttcagtggagcgtcggagtgacaggcgccgtggtgacgatggtggtttctttcctcgaacactggaaatccattggttgtccatcatcaactccatggtgcttgtgtttttactggtgggttttgtggctgtcattctaatgcgtgtgcttcggaatgacctggctcggtacaacttagatgaggagaccacctctgcaggttctggtgatgactttgaccagggtgacaatggctggaaaattatccatacagatgtcttccgcttccccccataccgtggtctgctctgtgctgtgcttggcgtgggtgcccagttcctggcccttggcactggcattattgtcatggcactgctgggcatgttcaatgtgcaccgtcatggggccattaactcagcagccatcttgttgtatgccctgacctgctgcatctctggctacgtgtccagccacttctaccggcagattggaggcgagcgttgggtgtggaacatcattctcaccaccagtctcttctctgtgcctttcttcctgacgtggagtgtggtctgtctcttanacacatctcaacatgca

SEQ ID NO: 2802 - DNA, 1069 bp, Homo sapiens
  misc_feature (3)..(3): n equals a,t,g, or c
  misc_feature (5)..(5): n equals a,t,g, or c
  misc_feature (1062)..(1062): n equals a,t,g, or c
  misc_feature (1069)..(1069): n equals a,t,g, or c
aananaaaatgtctttgcaaggggatcacacattattgacatttgctttctccatctcccctgttgaggattccatgaaggcagcagctgccttcatttccttactctgccatgtttggtgaatattataggatgagcatagatgggaaggagccttcattgcagtccagaagggctcctcatcctgtccctctgccccttaggcagcacgctggctcttctcctgaacttcctcgcctgcctggccagcttctgtgtggaaaccaacaatggcgcaggctttgggctttctatcctctgggtcctccttttcactccctgctcctttgtctgctggtaccgccccatgtataaggctttccggagtgacagttcattcaatttcttcgttttcttcttcattttcttcgtccaggatgtgctctttgtcctccaggccattggtatcccaggttggggattcagtggctggatctctgctctggtggtgccgaagggcaacacagcagtatccgtgctcatgctgctggtcgccctgctcttcactggcattgctgtgctaggaattgtcatgctgaaacggatccactccttataccgccgcacaggtgccagctttcagaaggcccagcaagaatttgctgctggtgtcttctccaaccctgcggtgcgaaccgcagctgccaatgcagccgctggggctgctgaaaatgccttccgggccccgtgacccctgactgggatgccctggccctgctacttgagggagctgacttagctcccgtccctaaggtctctgggacttggagagacatcactaactgatggctcctccgtagtgctcccaatcctatggccatgactgctgaacctgacaggcgtgtggggagttcactgtgacctagtccccccatcaggccacactgctgccacctctcacacgccccaacccagcttccctctgctgtgccacggctgttgcttcggttatttaaataaaaagaaagtggaactggaactgaaaaaaaaaaaaaaaaaagggggcccttttaaaggatccangtttacn

SEQ ID NO: 2803 - DNA, 589 bp, Homo sapiens
  misc_feature (522)..(522): n equals a,t,g, or c
  misc_feature (567)..(567): n equals a,t,g, or c
  misc_feature (580)..(580): n equals a,t,g, or c
ggcagagcggcacgagataaggctttccggagtgacagttcattcaatttcttcgttttcttcttcattttcttcgtccaggatgtgctctttgtcctccaggccattggtatcccagtggctggatctctgctctggtggtgccgaaggcaacacagcagtatccgtgctcatgctgctggtcgccctgctcttcactggcattgctgtgctaggaattgtcatgctgaaacggatccactccttataccgccgcacaggtgccagctttcagaaggcccagcaagaatttgctgctggtgtcttctccaaccctgcggtgcgaaccgcagctgccaatgcagccgctggggctgctgaaaatgccttccgggccccgtgacccctgactgggatgccctggccctgctacttgagggagctgattagctcccgtccctaargtctctgggacttggagagacatcactaactgatggctcctccgtartgcccccaatcctatggccatgamtgctgaanctgacaagcgtgtggggarttcatgtgacctartyccccccaatnaaggccaaaattngttggaaaa

SEQ ID NO: 2804 - DNA, 1001 bp, Homo sapiens
atgctgccctggggggcacagctactcgacagaacaattggccccctctaccttctttttgtccagttcagccctgctttttccaggacatctccatggagatcccccaagaatttcagaagactgtatccaccatgtactacctctggatgtgcagcacgctggctcttctcctgaacttcctcgcctgcctggccagcttctgtgtggaaaccaacaatggcgcaggctttgggctttctatcctctgggtcctccttttcactccctgctcctttgtctgctggtaccgccccatgtataaggctttccggagtgacagttcattcaatttcttcgttttcttcttcattttcttcgtccaggatgtgctctttgtcctccaggccattggtatcccaggttggggattcagtggctggatctctgctctggtggtgccgaaggcaacacagcagtatccgtgctcatgctgctggtcgccctgctcttcactggcattgctgtgctaggaattgtcatgctgaaacggatccactccttataccgccgcacaggtgccagctttcagaaggcccagcaagaatttgctgctggtgtcttctccaaccctgcggtgcgaaccgcagctgccaatgcagccgctggggctgctgaaaatgccttccgggccccgtgacccctgactgggatgccctggccctgctacttgagggagctgacttagctcccgtccctaaggtctctgggacttggagagacatcactaactgatggctcctccgtagtgctcccaatcctatggccatgactgctgaacctgacaggcgtgtggggagttcactgtgacctagtccccccatcaggccacactgctgccacctctcacacgccccaacccagcttccctctgctgtgccacggctgttgcttcggttatttaaataaaaagaaagtggaactggaactgacaaaaaaaaaaaaaaaaaaaaaaaaaaaaa

SEQ ID NO: 2805 - DNA, 860 bp, Homo sapiens; identical to SEQ ID NO: 535

SEQ ID NO: 2806 - DNA, 1113 bp, Homo sapiens
  misc_feature (53)..(53): n equals a,t,g, or c
  misc_feature (118)..(118): n equals a,t,g, or c
  misc_feature (140)..(140): n equals a,t,g, or c
  misc_feature (189)..(189): n equals a,t,g, or c
  misc_feature (207)..(207): n equals a,t,g, or c
  misc_feature (313)..(313): n equals a,t,g, or c
  misc_feature (355)..(355): n equals a,t,g, or c
  misc_feature (417)..(417): n equals a,t,g, or c
  misc_feature (827)..(827): n equals a,t,g, or c
  misc_feature (1099)..(1099): n equals a,t,g, or c
  misc_feature (1102)..(1102): n equals a,t,g, or c
tagccttaagccgtagtctaagtctggctgagatattagtaccaaacttggcntcagaactaagaatttgaaacagccggcttgcctctttctctgattattattataagggcctcgncggattcctgtaccatgagtgnattgattaccatcgtggtactccttgggatcgcctttgtagtctataanctgttcctgagtgccggncagtattctcctccaccgtactctgagtatcctccattttcccaccgttaccagagattcaccaactcagcaggacctcctcccccaggctttaagtctgagttcncaggccacagaatactggccatggtgcaacttctggttttgncagtgcttttacaggcaccaaggatatgaaaattcaggcccagggttctggacaggcttggnaactggtggaatactaggatatttgtttggcagcaatagagcggcaacacccttctcagactcgtggtactacccgtcctatcctccctcctaccctggcacgtggaatagggcttactcaccccttcatggaggctcgggcagctattcggtatgttcaaactcagacacgaaaaccagaactgcatcaggatatggtggtaccaggagacgataaagtagaaagttggagtcaaacactggatgcagaaattttggatttttcatcactttctctttagaaaaaaagtactacctgttaacaattgggaaaaggggatattcaaaagttctgtggtgttatgtccagtgtagctttttgtaktctattatttgaggctaaaagttgatgggcaaatctatggtgagtnccagtgtaacatgcagatgtatattgcagtttttgaaagtgatcattactgtggaatgctaaaaatacattaatttctaaaacctgtgatgccctaagaagcattaagaatgaaggtgttgtactaatagaaactaagtacagaaaatttcagttttaggtggttgtagctgatgagttattacctcatagagactataatattctatttggtattatattatttgatgtttgctgttcttcaaacatttaaatcaagctttggactaattntgntaatttggagt

SEQ ID NO: 2807 - DNA, 1928 bp, Homo sapiens
ggcacgaggcggtgtagctgcgcagcgtcgcgcgcgctaccgcacccaggttcggcccgtaggcgtctggcagcccggcgccatcttcatcgagcgccatggccgcagcctgcgggccgggagcggccgggtactgcttgctcctcggcttgcatttgtttctgctgaccgcgggccctgccctgggctggaacgaccctgacagaatgttgctgcgggatgtaaaagctcttaccctccactatgaccgctataccacctcccgcaggctggatcccatcccacagttgaaatgtgttggaggcacagctggttgtgattcttataccccaaaagtcatacagtgtcagaacaaaggctgggatgggtatgatgtacagtgggaatgtaagacggacttagatattgcatacaaatttggaaaaactgtggtgagctgtgaaggctatgagtcctctgaagaccagtatgtactaagaggttcttgtggcttggagtataatttagattatacagaacttggcctgcagaaactgaaggagtctggaaagcagcacggctttgcctctttctctgattattattataagtggtcctcggcggattcctgtaacatgagtggattgattaccatcgtggtactccttgggatcgcctttgtagtctataagctgttcctgagtgacgggcagtattctcctccaccgtactctgagtatcctccattttcccaccgttaccagagattcaccaactcagcaggacctcctcccccaggctttaagtctgagttcacaggaccacagaatactggccatggtgcaacttctggttttggcagtgcttttacaggacaacaaggatatgaaaattcaggaccagggttctggacaggcttgggaactggtggaatactaggatatttgtttggcagcaatagagcggcaacacccttctcagactcgtggtactacccgtcctatcctccctcctaccctggcacgtggaatagggcttactcaccccttcatggaggctcgggcagctattcggtatgttcaaactcagacacgaaaaccagaactgcatcaggatatggtggtaccaggagacgataaagtagaaagttggagtcaaacactggatgcagaaattttggatttttcatcactttctctttagaaaaaaagtactacctgttaacaattgggaaaaggggatattcaaaagttctgtggtgttatgtccagtgtagctttttgtattctattatttgaggctaaaagttgatgtgtgacaaaatacttatgtgttgtatgtcagtgtaacatgcagatgtatattgcagtttttgaaagtgatcattactgtggaatgctaaaaatacattaatttctaaaacctgtgatgccctaagaagcattaagaatgaaggtgttgtactaatagaaactaagtacagaaaatttcagttttaggtggttgtagctgatgagttattacctcatagagactataatattctatttggtattatattatttgatgtttgctgttcttcaaacatttaaatcaagctttggactaattatgctaatttgtgagttctgatcacttttgagctctgaagctttgaatcattcagtggtggagatggccttctggtaactgaatattaccttctgtaggaaaaggtggaaaataagcatctagaaggttgttgtgaatgactctgtgctggcaaaaatgcttgaaacctctatatttctttcgttcataagaggtaaaggtcaaatttttcaacaaaagtcttttaataacaaaagcatgcagttctctgtgaaatctcaaatattgttgtaatagtctgtttcaatcttaaaaagaatcaataaaaacaaacaaggggaaaaaaaaaaaaaaaaaaa

SEQ ID NO: 2808 - DNA, 593 bp, Homo sapiens
ggcacgagtgcctctgctcctccatgaatgacaattccaggcctcccctacctcatgtcctctcatttgggggattgctccgtgctgtccctttctctcaaggccgaagttgggaagtgagaaaccatgtttttaacttgtggctgcttttgctgctgctgctcctccgtatctggctgtatgggtggagaacccaccccctgcccaccacaggggtctccttccaggccactcaggacatttttagcttctctcctccccatgttcccttttttctctaaagtcccctgacatcagccctcccaactcctaagagggactacccatgagagtggggttctgaggctcccctatggggacagttccgttcttgaagtgtcagtgttggggaatatctgtggcctatgaggcccatctcaggtttggggatcccccagtccctatgatcagtgttggagtacccccctgggagagcctagtttctttgaggccccaggccctcttttaactacctttgaataggtgttatccctgtatttatggaaataaagttccatttcctcagtgtgaaaaaaaaaaaaaaaaaaactcga

SEQ ID NO: 2809 - DNA, 1379 bp, Homo sapiens
ggggcctcgaggactctctgcgtctctggagacaagggcactacacgcacttcagaatgaagagttcacctagggcgcaatggaatattccattgcccctcctgtcctgggtctgtgttgcggggaacgctcgcgcggttgccagagaaagccccggacgtgacggatttgcgcgaccccaagcagcccgcccttccccctcccatccgtcattcccctgcgctctctttcctcacccttccccccgccaccgtgggttccagacttgggataagtaaacagcgggtggagcgaggcctacggacccaggccaggtgggagtctgcactcttcaaggggcctgggctgctgctcacgggtattaaagaactccgcgttgttcatggctgaggcgatgcattaggagagatcctggacctagagaacaagtcccccgaacgctgagttggaggcgggacttcgggtgcgcgttggcgggagcatgctggggctctgggggcagcggctccccgcggcgtgggtcctgcttctgttgcctttcctgccgctgctgctgcttgcacccccgcgccccaccgcgcgtcctacaagccggtcatcgtggtgcatgggctcttcgacagctcgtacagcttccgccacctgctggaatacatcaatgagacacaccccgggactgtggtgacagtgctcgatctcttcgatgggagagagagcttgcgacccctgtgggaacaggtgcaagggttccgagaggctgtggtccccatcatggcaaaggcccctcaaggggtgcatctcatctgctactcgcaggggggcttgtgtgccgggctctgctttctgtcatggatgatcacaacgtggattctttcatctccctttctctcaaggccgaagttgggaagtgagaaaccatgtttttaacttgtggctgcttttgctgctgctgctcctccgtatctggctgtatgggtggagaacccaccccctgcccaccacaggggtctccttccaggccactcaggacatttttagcttctctcctccccatgttcccttttttctctaaagtcccctgacatcagccctcccaactcctaagagggactacccatgagagtggggttctgaggctcccctatggggacagttccgttcttgaagtgtcagtgttggggaatatctgtggcctatgaggcccatctcaggtttggggatcccccagtccctatgatcagtgttggagtacccccctgggagagcctagtttctttgaggccccaggccctcttttaactacctttgaataggtgttatccctgtatttatggaaataaagttccatttcctcagtgtgaaaaaaaaaaaaaaaaaaa

SEQ ID NO: 2810 - DNA, 2829 bp, Homo sapiens; identical to SEQ ID NO: 1130

SEQ ID NO: 2811 - DNA, 1366 bp, Homo sapiens
cctccccatagacgcttcccctgaccctctgtgttggtctgctctggctctcataagaaaataccagagactgagtggcttaaacaaaagacatttattttctcacagtcctggaggctggaagtccaagaccaaggtgttcgcagggttggtttcttctaaggcctctctccttggcttggagatggccctggttggtcttctgagtgcaggtgtccctggtgtctctttgtgtgtccagattttctcttataaggacactggtgagattggatgaggggccccctgacggcctcatcttaatgtmatcacctctcttatctccatatccattcacatacgggccattgcgagctaccggggattaggggttcaacacataaattgggggtgggggggtgcagctcagcccataaacatgccccctctggctcgctctcccagggcatccatcgtagcacttagaaaaatgatcacttcttttttggctttgtggtggcrtgtgtgtgtgtgtatttgtatatacacacatatatatataaatacacagacacacatatatacaaacacacgcattcattttcgtccacagttcctggctcataactcccacagcccttgttacactcttttgttacaacattgggtgtgtcaggcctcaggagacaatcactctaacctcctgcccttccttttacctgcccaagacaggactctaatcttccctacctttctgatggtgggtcataaaactcattccagagacggtcccaccccatatcctgctagaaggaatgctgctgtcatgaagcttccataaaaaccaaggggactggattcagagagcttccagataactgaacatacagaggttctagaagggtggtgcgcccagggagggcacaggaagctccatgcccttccttcatacctcaccctatgcatctctttatctgtatcttttataatatcctttataataaaccagtaaatgtatttcccttagttttgtgagccactccagcaaattgaacctacagagggaattgtgsgaacctcaacttgaagccagtcggtcagaagttccaaaggtcacccgggcgcggtggttcacgcctgtaatcccagcactttgggaggccgaggcgggtggatcaggagtttgagaccagcctagccaacatggtgaaaccctgtctttactgaaaatacgaaaaattagctgggcatcgtggtgrscgcctgtaatcccagctacttgggaggctgaagcaggagaattgcttgagcctgagaggcagaggctgcagtgagctgagatcgcgccactgcactccagcccgggcaacagagtgagactgtctca

SEQ ID NO: 2812 - DNA, 3747 bp, Homo sapiens; identical to SEQ ID NO: 2137

SEQ ID NO: 2813 - DNA, 1347 bp, Homo sapiens
  misc_feature (16)..(16): n equals a,t,g, or c
  misc_feature (55)..(55): n equals a,t,g, or c
  misc_feature (119)..(119): n equals a,t,g, or c
  misc_feature (175)..(175): n equals a,t,g, or c
  misc_feature (190)..(190): n equals a,t,g, or c
  misc_feature (246)..(246): n equals a,t,g, or c
agctgaattacccccnaaaggacaaaactgagtccacccggtgccgcccctctanactagtgatccccgggctgcagaattcgcacgagctcatcgtaacctgtcccagacctacatgnccatgtacctcacctactcgctccacctgcccaagaagttcatcgcgaccattctnctggtgatgtacctnagcggcttcttgtcctccttcctcatgaagcccatcaacaagtgcattgggaggancatgacctacttctcaggcctcctggtgatcctggcctttgccgcctgggtggcgctggcggagggactgggtgtggccgtgtacgcagcggctgtgctgctgggtgctggctgtgccaccatcctcgtcacctcgctggccatgacggccgacctcatcggtccccacacgaacagcggagcgttcgtgtacggctccatgagcttcttggataaggtggyyaatgggctggcagtcatggccatccagagcctgcacccttgcccctcagagctctgctgcagggcctgcgtgagcttttaccactgggcgatggtggctgtgacgggcggcgtgggcgtggccgctgccctgtgtctctgtagcctcctgctgtggccgacccgcctgcgacgctcttttcttgcctggagaagagggaggggagaggacaagggccctggctactcctggattcctacagtccttgtccagcctccaagacccacaagtcccttcctctgggaagcccccctggcctggaggtgcaccaggaagaagtggtctggggctggcactaagccatggcccagggaagactgggggacccactaggccaggatgagacctgcacgcagtggctcacagcagcacgatttgtgacagcccgaggcggaraacaccgaacacccagtgaaggtgaggggatcagcacggcgcggycacccacgcacccacgcgctggaatgagactcagccacaaggaggtgcgaagctctgacccaggccacagtgcggatgcaccttgaggatgtcacgctcagtgagagacaccagacacagaagggtacgctgtgatcccacttctatgawatgtycaggacagaccaatccacagaatcagggagaggattcgtgggtgccgggactggggagggggacctgggggtgactaggtgacataatggggacagggctgccttctgggtgatgagaatgttctggaatcagatgggatggctgcacggcgtggtgaaggtactgaacgccacctcactgtaagacggtagattttgtattttaccacaataaacaaaacaaaacaaaaccaaaaaaaaaaa

SEQ ID NO: 2814 - DNA, 1951 bp, Homo sapiens; identical to SEQ ID NO: 669

SEQ ID NO: 2815 - DNA, 1271 bp, Homo sapiens
ctcatcgtgaacctgtcccagacctacatggccatgtacctcacctactcgctccacctgcccaagaagttcatcgcgaccattctcctggtgatgtacctcagcggcttcttgtcctccttcctcatgaagcccatcaacaagtgcattgggaggaacatgacctacttctcaggcctcctggtgatcctggcctttgccgcctgggtggcgctggcggagggactgggtgtggccgtgtacgcagcggctgtgctgctgggtgctggctgtgccaccatcctcgtcacctcgctggccatgacggccgacctcatcggtccccacacgaacagcggagcgttcgtgtacggctccatgagcttcttggataaggtggccaatgggctggcagtcatggccatccagagcctgcacccttgcccctcagagctctgctgcagggcctgcgtgagcttttaccactgggcgatggtggctgtgacgggcggcgtgggcgtggccgctgccctgtgtctctgtagcctcctgctgtggccgacccgcctgcgacgctcttttcttgcctggagaagagggaggggagaggacaagggccctggctactcctggattcctacagtccttgtccagcctccaagacccacaagtcccttcctctgggaagcccccctggcctggaggtgcaccaggaagaagtggtctggggctggcactaagccatggcccagggaagactgggggacccactaggccaggatgagacctgcacgcagtggctcacagcagcacgatttgtgacagcccgaggcggagaacaccgaacacccagtgaaggtgaggggatcagcacggcgcggccacccacgcacccacgcgctggaatgagactcagccacaaggaggtgcgaagctctgacccaggccacagtgcggatgcaccttgaggatgtcacgctcagtgagagacaccagacacagaagggtacgctgtgatcccacttctatgaaatgtccaggacagaccaatccacagaatcagggagaggattcgtgggtgccgggactggggagggggacctgggggtgactaggtgacataatggggacagggctgccttctgggtgatgagaatgttctggaatcagatgggatggctgcacggcgtggtgaaggtactgaacgccacctcactgtaagacggtagattttgtattttaccacaataaacaaaacaaaacaaaaccaaaaaaaaaaaaaaaaaaaaaaa

SEQ ID NO: 2816 - DNA, 1741 bp, Homo sapiens
aagtgctgggattataggcttgagccactgggcctggctgaggcagtttctttttgaaatatattttgtgaaggagaaaaagaggagttcagtttaaagaaacaaatgacataagaggtggtatgcagagatgccaaagcatcttgaaggtgctttttttttggaaacagagtcttgcttcattgcccagtctggtctgcagtggtgcaatcatggttccctgcagccttgaccttctgggctcaagtaatcctcccacctcagcctctcaagtagctgggactacagatgcatgccactatgtctggctaatctttaaattttttgtagaagccagctctcaccatattgcccaggctggtcttgacctcctgtcctcgagcaaaaataccgattttgattaagtctggggtaggacctggggctgggattctaaccagctcccaggtggtgctaatgctgctggtctacagaccacacgtggagtagccagtgtagagttcatgtagcaatagtgatgtcatagaaatagccagtatctgtatacttgctttgttgtatgtcacgcactgtatagtgatgtacatgcatctcatttgaccctcaccccgcccctttgggggtagaaaggattgtgctcatttcacactcaaggaaactgaggcacagacaggcaaagtagcttggcgaaacagaaaggaacttagaggcaggccctgattagctcagagactagaaggccttgtgcgtcatcctgaacagcttggacttgatcttgaaggtggagggagaaattgaagggtaattaaacaggaactgtaggaaattcaccttgcatagtgattgctttggccacgtgtgccctgccaccgcccccccacctcagtgaagtgtcatgcgaagttgggttcgtaaatgaaggcccgaatgctttcctgacaagtttgttttaaatcaagctgctaattagtcccagtccccctcccccggtatgtatttttttgttgatgtcgtttcacttcatttagttgaagtgattgattcagttcagtgtttgaacttctttttgaacctcaccttaataacctgtctaaacatcaaggttaaaccttcttgctaacacagcagtattgcttggtaagactggctcacagtccaaggaaatgcttgcccagagagggcaaactgccttaactccttaacctgagctcattaaaaaaaattcaaatgactgattccttgtcacagttctacctacattgtttttatttttgtccaggtttcagctagttaaatgcttttgtgatgagcttatgtccaggctgaaggttgcattttgaaactgagcgtcaaataccaatttaaagtccagacctttacacttgtgaaattcagataaatgaaatggaaataaaacagggctgctgtgttgtgaaatatgactgtgtttttccttgtaggactctttgagggtagccattttggcattttatatataaattttcttttcttagcctaccttttactttcttgatttgcctatttgtgatttcccattaaacactaggctttttgtaaaccaattatcccttgaaattgactttttttttttttgagacaggatcttgttttgccacacaggctggagtgccgtggctccatcatatgataaacagaaagagagagagagagagagagagagagagagagagagaccctgtcttatttaaaacaaaaaaaa

SEQ ID NO: 2817 - DNA, 2829 bp, Homo sapiens; identical to SEQ ID NO: 1130

SEQ ID NO: 2818 - DNA, 2304 bp, Homo sapiens
gtgccgtgcagctgcacgtgaaagagccccgcctccggttcacacggcccctgcaggacgtggagggccgtgagcacgggattgccgtgctggaatgtaaagtacccaactcccgcatccccacggcctggttccgtgaggaccagcggctgctgccctgccgcaagtacgagcagatcgaagagggcactgtccggcgcctcatcatccacaggctgaaggcagacgatgatggtatctacctgtgcgagatgcggggccgggtgcgcaccgtggccaacgtcacagtcaaagggcccatcctgaagcgcctgccccggaagctcgacgtcctggaaggagagaatgctgtgctgctagtggaaactctagaggccggggtcgagggacgctggagccgtgatggggaggagctgccggtcatctgccagagcagctcaggccacatgcatgccctggtccttccaggggtcacccgagaggatgctggcgaggtcacctttagcctgggcaactcccgtaccactacgcttctcagagtaaaatgtgtcaagcacagtcccccaggaccccccatattggcagagatgttcaagggccacaagaacacggtcctgttgacctggaagcctcccgagccagctcccgagaccccattcatctaccggctggagcggcaggaagtgggctctgaagactggattcagtgcttcagcatcgagaaagccggagccgtggaggtgccgggcgactgtgtgccctccgagggtgactaccgcttccgcatctgcacagtcagcggacatggccgtagtccccacgtggtgttccacggttctgctcaccttgtgcccacagctcgcctggtggcaggtctggaggatgtgcaggtatacgacggggaagatgccgtcttctccctcgatctctccaccatcatccagggtacctggttccttaatggggaagagctcaagagtaacgagccggagggccaggtggaacctggggccctgcggtaccgtatagagcagaagggtctgcagcacagactcatcctgcatgccgtcaagcaccaggacagcggtgccctggtcggcttcagctgccccggcgtgcaggactcagctgccctcacaatccaagagagcccggtgcacatcctgagcccccaggacaaggtgtcgttgaccttcacaacctcagagcgggtggtgctgacttgtgagctctcaagggtggacttcccggcaacctggtacaaggatgggcagaaggtggaggagagcgagttgctggtggtgaagatggatgggcgcaaacaccgtctgatcctgcctgaggccaaagtccaggacagtggcgagtttgagtgcaggacagaaggggtctcggccttcttcggcgtcactgtccaagatcctcccgtgcacatcgtggacccccgagaacatgtgttcgtgcatgccataacttccgagtgtgtcatgctggcctgtgaggtggaccgagaggacgcccctgtgcgttggtacaaggacgggcaggaggtggaggagagtgacttcgtggtgctggagaatgaggggccccatcgccgcctggtgctgcccgccacccagccctcagacgggggcgagtttcagtgcgtcgctggagatgagtgtgcctacttcactgtcaccatcacagacgtctcctcgtggatcgtgtatcccagcggcaaggtgtatgtggcagccgtgcgcctggagcgtgtggtgctgacctgtgagctatgccggccctgggcagaggtgcgctggaccaaggatggagaggaggtggtggagagccccgcgctgctcctgcagaaggaagacactgtccgccgcctggtgctgcccgctgtccagctcgaggactccggcgagtacttgtgtgaaattgacgatgagtcggcctccttcactgtcaccgtcacagagtcttaccaaagtcaggacagttcaaataacaatccggagttatgcgtcctcttgaaaaagccgaagacccggcggctctggtcccgcttccccccatggcgacgaacagctggcactgagtagcagctgcccccatagtttggggcccacattcctctgtcccacctccctgccattgctttttgcctctccccagactgcttcagccgctaacctaacctggcccctgtgggcatttgagtttgcgacccctgtgttaaaccaataaacatgcaaataaatgtaaaaaaaaaaaaaaaaaaaaaaaaaaaaaaggggggggggcggacgcgtgggc

SEQ ID NO: 2819 - DNA, 2254 bp, Homo sapiens
cgtgagaccagcggctgctgccctgccgcaagtacgagcagatcgaagagggcactgtccggcgcctcatcatccacaggctgaaggagacgatgatggtatctacctgtgcgagatgcggggccgggtgcgcaccgtggccaacgtcacagtcaaagggcccatcctgaagcgctgccccggaagctcgacgtcctggaaggagagaatgctgtgctgctagtggaaactctagaggccggggtcgagggacgctggagccgtgatggggaggagctgccggtcatctgccagagcagctcaggccacatgcatgccctggtccttccaggggtcacccgagaggatgctggcgaggtcacctttagcctgggcaactcccgtaccactacgcttctcagagtaaaatgtgtcaagcacagtcccccaggaccccccatattggcagagatgttcaagggccacaagaacacggtcctgttgacctggaagcctcccgagccagctcccgagaccccattcatctaccggctggagcggcaggaagtgggctctgaagactggattcagtgcttcagcatcgagaaagccggagccgtggaggtgccgggcgactgtgtgccctccgagggtgactacccgcttccgcatctgcacagtcagcggacatgccgtagtccccacgtggtgttccacggttctgctcacctttgtgcccacagctcgcctggtggcaggtctggaggatgtgcaggtatacgacggggaagatgccgtcttctccctcgatctctccaccatcatccagggtacctggttcccttaatggggaagagctcaagagtaacgagccggagggccaggtggaacctggggccctgcggtaccgtatagagcagaagggtctgcagcacagactcatcctgcatgccgtcaagcaccaggacagcggtgccctggtcggcttcagctgcccccggcgtgcaggattcagctgccctcacaatccaagagaagcccggtgcacatcctgagcccccaggacaaggtgtcgttgaccttcacaacctcgagcgggtggtgctgacttgtgagctctcaagggtggacttcccggcaacctggtacaaggatgggcagaaggtggaggagagcgagttgctggtggtgaagatggatgggccgcaaacaccgtctggatcctgcctgaaggccaaagtccaggacagtggcgagtttgagtgcaggacaagaaggggtctcggccttcttcggcgtcactgtccaagatcctcccgtgcacatcgtggacccccgagaacatgtgttcgtgcatgccataacttccgagtgtgtcatgctggcctgtgaggtggaccgagaggacgcccctgtgcgttggtacaaggacgggcaggaggtggaggagagtgacttcgtggtgctggagaatgaggggccccatcgccgcctggtgctgcccgccacccagccctcagacgggggcgagtttcagtgcgtcgctggagatgagtgtgcctacttcactgtcaccatcacagacgtctcctcgtggatcgtgtatcccagcggcaaggtgtatgtggcagccgtgcgcctggagcgtgtggtgctgacctgtgagctatgccggccctgggcagaggtgcgctggaccaaggatggagaggaggtggtggagaccccgcgctgctcctgcagaaggaagacactgtccgccgcctggtgctgcccgctgtccagctcgaggactccggcgagtacttgtgtgaaattgacgatgagtcggcctccttcactgtcaccctcacagagtcttaccaaagtcaggacagttcaaataacaatccggagttatgcgtcctcttgaaaaagccgaagacccggcggctctggtcccgcttccccccatggccacgaacagctggcactgagtagcagctgcccccatagtttggggcccacattcctctgtcccacctccctgccattgctttttgcctctccccagaccgcttcaccttccacccgggtgtggtaccaggtaagtgtacccgtttgcgacccctgtgttaaaccaataaacatgcaaataaatgtacaacgtcgtgactgggaaaaccctggcgttacccaactaatcgccttgcagcacatccccctttcgccagctggcgtaatagcgaagagcccgaccgatcgcctttccaacaagttgcgcagcctgaatggt

SEQ ID NO: 2820 - DNA, 1367 bp, Homo sapiens
tcccggggtttaagtactgctgtgaaccagctgagtcccaggagagaggcggcaacggacaggaggtgtggtctttccttaccagtcccccaacgggcgctaccagttcaacttccacgagggccagcaggtctgtgcagagcaggctgcggtggtggcctcctttgagcagctcttccgggcctgggaggagggcctggactggtgcaacgcgggctggctgcaggatgccacggtgcagtaccccatcatgttgccccggcagccctgcggtggcccgggcctggcacctggcgtgcgaagctacggcccccgccaccgccgcctgcaccgctatgatgtattctgcttcgctactgccctcaaggggcgggtgtactacctggagcaccctgagaagctgacgctgacagaggcaagggaggcctgccaggaagatgatgccacgatygccaaggtgggacagctctttgccgcctggaagttccatggcctggaccgctgcgacgctggctggctggcagatggyagcgtccgctaccctgtggttcacccgcatcctaactgtgggcccccagagcctggggtccgaagctttggcttccccgacccgcagagccgcttgtacggtgtttactgctaccgccagcactaggacctggggccctcccctgccgcattccctcactggctgtgtatttattgagtggttcgttttcccttgtgggttggagccattttaactgtttttatacttctcaatttaaattttctttaaacatttttttactattttttgtaaagcaaacagaacccaatgcctccctttgctcctggatgccccactccaggaatcatgcttgctcccctgggccatttgcggttttgtgggcttctggagggttccccgccatccaggctggtctccctcccttaaggaggttggtgcccagagtgggcggtggcctgtctagaatgccgccgggagtccgggcatggtgggcacagttctccctgcccctcagcctgggggaagaagagggcctcgggggcctccggagctgggctttgggcctctcctgcccacctctacttctctgtgaagccgctgaccccagtctgcccactgaggggctagggctggaagccagttctaggcttccaggcgaaagctgagggaaggaagaaactcccctccccgttccccttcccctctcggttccaaagaatctgttttgttgtcatttgtttctcctgtttccctgtgtggggaggggccctcaggtgtgtgtactttggacaataaatggtgctatgactgccaaaaaaaaaaaaaaaaaactcgagggggggcccggtacccaatt

SEQ ID NO: 2821 - DNA, 1990 bp, Homo sapiens
  misc_feature (1243)..(1243): n equals a,t,g, or c
  misc_feature (1257)..(1257): n equals a,t,g, or c
  misc_feature (1263)..(1263): n equals a,t,g, or c
tcgacccacgcgtccggcgcgggggtttttctgctgccgcttcctttctgcccttttaatttccccgaaatcagactgctgccttggaccgggacagctcgcggcccccgagagctctagccgtcgaggagctgcctggggacgtttgccctggggccccagcctggcccgggtcaccctggcatgaggagatgggcctgttgctcctggtcccattgctcctgctgcccggctcctacggactgcccttctacaacggcttctactactccaacagcgccaacgaccagaacctaggcaacggtcatggcaaagacctccttaatggagtgaagctggtggtggagacacccgaggagaccctgttcacctaccaaggggccagtgtgatcctgccctgccgctaccgctacgagccggccctggtctccccgcggcgtgtgcgtgtcaaatggtggaagctgtcggagaacggggccccagagaaggacgtgctggtggccatcgggctgaggcaccgctcctttggggactaccaaggccgcgtgcacctgcggcaggacaaagagcatgacgtctcgctggagatccaggatctgcggctggaggactatgggcgttaccgctgtgaggtcattgacgggctggaggatgaaagcggtctggtggagctggagctgcggggtgtggtctttccttaccagtcccccaacgggcgctaccagttcaacttccacgagggccagcaggtctgtgcagagcaggctgcggtggtggcctcctttgagcagctcttccgggcctgggaggagggcctggactggtgcaacgcgggctggctgcaggatgccacggtgcagtaccccatcatgttgccccggcagccctgcggtggcccaggcctggcacctggcgtgcgaagctacggcccccgccaccgccgcctgcaccgctatgatgtattctgcttcgctactgccctcaaggggcgggtgtactacctggagcaccctgagaagctgacgctgacagaggcaagggaggcctgccaggaagatgatgccacgattgccaaggtgggacagctctttgccgcctggaagttccatggcctggaccgctgcgacgctggctggctgcagatggcagcgtccgctaccctgtggttacccgcatcctaactgtgggcccccagagcctggggtccgaagctttggcttccccgacccgcagagccgcttgnacggkgkttactgntaccgncagcactaggacctggggcccttccctgccgcattccctyactggctgkgkawttattgagtggttcgttttcccttgkgggttggagccattttaactgkttttawacttctcaatttaaattttctttaaacatttttttactattttttgtaaagcaaacagaacccaatgcctccctttgctcctggatgccccactccaggaatcatgcttgctcccctgggccatttgcggttttgtgggcttctggagggttccccgccatccaggctggtctccctcccttaaggaggttggtgcccagagtgggcggtggcctgtctagaatgccgccgggagtccgggcatggtgggcacagtctycctgccctcarcctgggggaagaagagggcctcgggggcctccggagctgggctttgggcctctcctgcccacctctacttctctgtgaagccgctgaccccagtctgcccactgaggggctagggctggaagccagttctaggcttccaggcgaaagctgagggaaggaagaaactcccctccccgttccccttcccctctcggttccaaagaatctgttttgttgtcatttgtttctcctgtttccctgtgtggggaggggccctcaggtgtgtgtactttggacaataaatggtgctatgactgccttccgccaaaaaaaaaaaaaaaaaaaaaaaaaaaaaaaaaaaaaaaaaaaaa

SEQ ID NO: 2822 - DNA, 1774 bp, Homo sapiens
gcctgccggtaccggtccggaattcccgggtcgacccacgcgtycgcccacgcgtccggaaggaactggtctgctcacacttgctggcttgcgcatcaggactggctttatctcctgactcacggtgcaaaggtgcactctgcgaacgttaagtccgtccccagcgcttggaatcctacggcccccacagccggatcccctcagccttccaggtcctcaactcccgcggacgctgaacaatggcctccatggggctacaggtaatgggcatcgcgctggccgtcctgggctggctggccgtcatgctgtgctgcgcgctgcccatgtggcgcgtgacggccttcatcggcagcaacattgtcacctcgcagaccatctgggagggcctatggatgaactgcgtggtgcagagcaccggccagatgcagtgcaaggtgtacgactcgctgctggcactgccgcaggacctgcaggcggcccgcgccctcgtcatcatcagcatcatcgtggctgctctgggcgtgctgctgtccgtggtggggggcaagtgtaccaactgcctggaggatgaaagcgccaaggccaagaccatgatcgtggcgggcgtggtgttcctgttggccggccttatggtgatagtgccggtgtcctggacggcccacaacatcatccaagacttctacaatccgctggtggcctccgggcagaagcgggagatgggtgcctcgctctacgtcggctgggccgcctccggcctgctgctccttggcggggggctgctttgctgcaactgtccaccccgcacagacaagccttactccgccaagtattctgctgcccgctctgctgctgccagcaactacgtgtaaggtgccacggctccactctgttcctctctgctttgttcttccctggactgagctcagcgcaggctgtgaccccaggagggccctgccacgggccactggctgctggggactggggactgggcagagactgagccaggcaggaaggcagcagccttcagcctctctggcccactcggacaacttcccaaggccgcctcctgctagcaagaacagagtccaccctcctctggatattggggagggacggaagtgacagggtgtggtggtggagtggggagctggcttctgctggccaggatggcttaaccctgactttgggatctgcctgcatcggtgttggccactgtccccatttacattttccccactctgtctgcctgcatctcctctgttgcgggtaggccttgatatcacctctgggactgtgccttgctcaccgaaacccgcgcccaggagtatggctgaggccttgcccacccacctgcctgggaagtgcagagtggatggacgggtttagaggggaggggcgaaggtgctgtaaacaggtttgggcagtggtgggggagggggccagagaggcggctcaggttgcccagctctgtggcctcaggactctctgcctcacccgcttcagcccagggcccctggagactgatcccctctgagtcctctgccccttccaaggacactaatgagcctgggagggtggcagggaggaggggacagcttcacccttggaagtcctggggtttttcctcttccttctttgtggtttctgttttgtaatttaagaagagctattcatcactgtaattattattattttctacaataaatgggacctgtgcacaggaaaaaaaaaaaaaaaaaaaaaaaaaaaaaaaaaaaaaaaaaagggcggccgc

SEQ ID NO: 2823 - DNA, 623 bp, Homo sapiens
  misc_feature (1)..(1): n equals a,t,g, or c
  misc_feature (6)..(6): n equals a,t,g, or c
  misc_feature (8)..(8): n equals a,t,g, or c
  misc_feature (599)..(599): n equals a,t,g, or c
  misc_feature (614)..(614): n equals a,t,g, or c
nggtancngacagtacggtcggaattcccgggtcgacccacgcgtccgaaattatatttaagatattaacttttatgtgaaatggtgattaggttatgggtgggggtggggggctggagtggggaaattggaagaaaagtataatgtccaaaaccgttaagaataaatttttatgctttttagtttgaattattttttgttcmttatagtgttttcattttgtgagtttttctatgcacatacaaaatgtttctcctcaggcccccttgtatttgctggtcctatttttatgaaccatcgagaacaggctctagccagactcagatcccatccagcacagctaaagcataaacgggacaagcacaaaggtatttggtcttccttatcacctaggtgggatactttcccaatttcttccactcatttgaattttgtctctgggaaaawgcacaaacctgattcttctactttgcttctatcatgatgtagcctgaggagaaagaacattctgaaagtgataccgtttgtcagtgactgtcatgcttcttgtttttttgttgtcgttagctttcataaaggagatattttacmatamaaanaaaaaaaaaaaaaanaaaaaaaaa

SEQ ID NO: 2824 - DNA, 979 bp, Homo sapiens
gtacgcctgcaggtaccggtcggaattcccgggtcgacccacggcgtccgctctaccttcattaattacttctggcaagatgttctgccttagcactcagttgcattcttttcctttttcttcctgttcattatgctttaattctgaggaccatatgagggtagaatatattatcttttaaaaattacaaaaatttgtataggcaaaccatttcttaaagttgatggccaaattttaaaatgttatttttcatatcatttataatcttgtcacaatccacttaaagaagtttggttatatttcagtgaaaattttcttccagagtaggttttttttcgtgggttggggggtaactttactacaattagtaagtatggtgcagaatttcatgcaaatgaggagtgccagcagtgtgataatttaaacatatttaaacaaaaacaaaaaaaatgaatgcacaaacttgctgctgcttagatcactgcagcttctaggacccggtttcttttactgatttaaaaacaaaacaaaaaaaaataaaaaagttgtgcctgaaatgaatcttgtttttttttataagtagccgcctggttactgtgtcctgtaaaatacagacacttgacccttggtgtagcttctgttcaactttatatcacgggaatggatgggtctgatttcttggccctcttcttgaattggccatatacagggtccctggccagtggactgaaggctttgtctaagatgacaagggtcagctcaggggatgtgggggagggcggttttatcttcccccttgtcgtttgaggttttgatctctgggtaaagaggccgtttatctttgtaaacacgaaacatttttgctttctccagttttctgttaatggcgaaagaatggaagcgaataaagttttactgatttttgagacactaaaaaaaaaaaaaaaaaaaaaaaaaaaaaaaaaaaagggaggggggg

SEQ ID NO: 2825 - DNA, 680 bp, Homo sapiens; identical to SEQ ID NO: 2070

SEQ ID NO: 2826 - DNA, 698 bp, Homo sapiens; identical to SEQ ID NO: 2071

SEQ ID NO: 2827 - DNA, 874 bp, Homo sapiens; identical to SEQ ID NO: 487
  misc_feature (152)..(152): n equals a,t,g, or c
  misc_feature (828)..(863): n equals a,t,g, or c

SEQ ID NO: 2828 - DNA, 593 bp, Homo sapiens; identical to SEQ ID NO: 2808

SEQ ID NO: 2829 - DNA, 1379 bp, Homo sapiens; identical to SEQ ID NO: 2809

SEQ ID NO: 2830 - DNA, 1969 bp, Homo sapiens
ggcacgagctgccctcaacactgtgacagcagtgagtgcaaaagcagcccgcgctgcaagaggacagtgctcgacgactgtggctgctgccgagtgtgcgctgcagggcggggagaaacttgctaccgcacagtctcaggcatggatggcatgaagtgtggcccggggctgaggtgtcagccttctaatggggaggatccttttggtgaagagtttggtatctgcaaagactgtccctacggcaccttcgggatggattgcagagagacctgcaactgccagtcaggcatctgtgacagggggacgggaaaatgcctgaaattccccttcttccaatattcagtaaccaagtcttccaacagatttgtttctctcacggagcatgacatggcatctggagatggcaatattgtgagagaagaagttgtgaaagagaatgctgccgggtctcccgtaatgaggaaatggttaaatccacgctgatcccggctgtgatttctgagagaaggctctattttcgtgactgttcaacacacagccaacattttaggaactttctagattatagcataaggacatgtaatttttgaagaccaaatgtgatgcatggtggatccagaaaacaaaaagtaggatacttacaatccataacatccatatgactgaacacttgtatgtgtttgttaaatattcgaatgcatgtagatttgttaaatgtgtgtgtatagtaacactgaagaactaaaaatgcaatttaggtaatcttacatggagacaggtcaaccaaagagggagctaggcaaagctgaagaccgcagtgagtcaaattagttctttgactttgatgtacattaatgttgggatatggaatgaagacttaagagcaggagaagatggggagggggtgggagtgggaaataaaatatttagcccttccttggtaggtagcttctctagaatttaattatgcttttttttttttttttggctttgggaaaagtcaaaataaaacaaccagaaaacccctgaaggaagtaagatgtttgaagcttatggaaatttgagtaacaaacagctttgaactgagagcaatttcaaaaggctgctgatgtagttcccgggttacctgtatctgaaggacggttctggggcataggaaacacatacacttccataaatagctttaacgtatgccacctcagagataaatctaagaagtattttacccactggtggtttgtgtgtgtatgaaggtaaatatttatatatttttataaataaatgtgttagtgcaagtcatcttccctacccatatttatcatcctcttgaggaaagaaatctagtattatttgttgaaaatggttagaataaaactatgactctataaggttttcaaacatctgaggcatgataaatttattatccataattatagtaataataaccttaataagcataagaaaaacagagtcactctggatttcaaaaatatcaaaaaatgagcaacagagggtccttatttaaacataagtgctgtgacttaggtgaattttcaatttaaggtagaaaataagtttttaggaggtttgtaaaagaagaatcaattttcagcagaaaacatgtcaactttaaaatatagtttattttcatatttttttcttttaaacttggttgataagtggaattaggagtatatttgaaagaatcttagcacaaacaggactgttgtactagatgttcttaggaaatatctcagaagtattttatttgaagtgaagaacttatttaagaattatttcagtatttacctgtattttattcttgaagttggccaacagagttgtgaatgtgtgtgggaaggcctttgaatgtaaagctgcataagctgttaggttttgttttaaaaggacatgtttattattgttcaataaaaaagaacaagatacagaaaaaaaaaaaaaaaaaaaa

SEQ ID NO: 2831 - DNA, 1702 bp, Homo sapiens
  misc_feature (1642)..(1642): n equals a,t,g, or c
ggtgagtctgcggctcggcgacttggtgtgggggaaactcggccgatatcctccttggccaggaaagattgttaatccaccaaaggacttgaagaaacctcgcggaaagaaatgcttctttgtgaaattttttggaacagaagatcatgcctggatcaaagtggaacagctgaagccatatcatgctcataaagaggaaatgataaaaattaacaagggtaaacgattccagcaagcggtagatgctgtcgaagagttcctcaggagagccaaagggaaagaccagacgtcatcccacaattcttctgatgacaagaatcgacgtaattccagtgaggagagaagtaggccaaactcaggtgatgagaagcscaaacttagcctgtctgaagggaaggtgaagaagaacatgggagaaggaaagaagagggtgtcttcaggctcttcagagagaggctccaaatcccctctgaaaagagcccaagagcaaagtccccggaagcggggtcggcccccaaaggatgagaaggatctcaccatcccggagtctagtaccgtgaaggggatgatggccggaccgatggccgcgtttaaatggcagccaaccgcaagcgagcctgttaaagatgcagatcctcatttccatcatttcctgctaagccaaacagagaagccagctgtctgttaccaggcaatcacgaagaagttgaaaatatgtgaagaggaaactggctccacctccatccaggcagctgacagcacagccgtgaatggcagcatcacacccacagacaaaaagataggatttttgggccttggtctcatgggaagtggaatcgtctccaacttgctaaaaatgggtcacacagtgactgtctggaaccgcactgcagagaaagagggggcccgtctgggaagaacccccgctgaagtcgtctcaacctgcgacatcactttcgcctgcgtgtcggatcccaaggcggccaaggacctggtgctgggccccagtggtgtgctgcaagggatccgccctgggaagtgctacgtggacatgtcaacagtggacgctgacaccgtcactgagctggcccaggtgattgtgtccaggggggggcgctttctggaagcccccgtctcagggaatcagcagctgtctaatgacgggatgttggtgatcttagcggctggagacaggggcttatatgaggactgcagcagctgcttccaggcgatggggaagacctccttcttcctaggtgaagtgggcaatgcagccaagatgatgctgatcgtgaacatggtccaagggagcttcatggccactattgccgaggggctgaccctggcccaggtgacaggccagtcccagcagacactcttggacatcctcaatcagggacagttggccagcatcttcctggaccagaagtgccaaaatatcctgcaaggaaactttaagcctgatttctacctgaaatacattcagaaggatctccgcttagccattgcgctgggtgatgcggtcaaccatccgactcccatggcagctgcagcaaatgakgtgtacaaaagagccaaggcgctggaccagtccgacacgatatgtccgccgtgtaccgagcctacatacactaagctgtcnacaccccggccttacccctccaatcccccctctgaccccctcttcctcacatggggacgg

SEQ ID NO: 2832 - DNA, 764 bp, Homo sapiens
  misc_feature (15)..(15): n equals a,t,g, or c
  misc_feature (755)..(756): n equals a,t,g, or c
gctccttctgtttcnttagccacagactctcactggctctgaagagccactctacctcgtcccctcccagtggtcccaccttctccaccctgcctgccaatcccctgcatgcccaccgctctccatcctccctcctctccctcttcctcccgtggagacagtatttctttctgtctgtccctttggcccagacccagcctgaccaacgatgagcatttcttaggctcagctcttgatacggaaacgagtgtcttcactccagccagcatcatggtcttcggtgcttcccgggcccggggtctgtcgggagggaagagaactgggcctgacctacctgaactgactggccctccgaggtgggtctgggacatcctagaggccctacatttgtccttggataggggaccggggggggcttggaatgttgcaaaaaaaaaagttacccaagggatgtcagttttttatccctctgcatgggttggattttccaaaatcataatttgcagaaggaaggccagcatttacgatgcaatatgtaattatatatagggtggccacactagggcggggtccttcccccctcacagctttggcccctttcagagattagaaactgggttagaggattgcagaagacgagtggggggagggcagggaagatgcctgtcgggtttttagcacagttcatttcactgggattttgaagcatttctgtctgaacacaaagcctgttctagtcctggcggacacactgnnggtggggg

SEQ ID NO: 2833 - DNA, 776 bp, Homo sapiens
  misc_feature (707)..(707): n equals a,t,g, or c
cagaaactgctgcctggctttttttcttccgagcttgtcttatctcaaaccccttccagtcaaggaactagaatcagcaacgagagttggaagccttcccacagcttcccccagagcgaagaggctgtagtcatgtccccatcccccactggattccctacaaggagaggccttgggcccagatgagccagtacagactccagacagaggggcccttggggccctccaacctcaggtgatgagctgagaaagatgttcacgtctaagcgtccagtgtgcacccagcgctccatagacgcctttgtgaactgaaaagagactggcagagtcccgagaagatggggccctggctttccagggagtgcagcaagcagccggcctgcaggtgagcatggaggcccggccctcaccgcctcgaagccatgccccagatgccactgccacagcgggcgctcgctcctccctaggctgttttagtatttggatttgcattccatcccttgggagggagtcctcagggccactagtgatgagccaagaggagtgggggttgggggcgctcctttctgtttccgttaggccacagactcttcacctggctctgacttacctcggtcccctcccagtggtcccaccttctccaccctgccctgccaagtcccctgcatgcccaccgctctccatcctccctcctctccctcttcctnccgtggagacagtatttctttctgtctgtccctttggcccagacccagcctgaccaacgatgagcattt

SEQ ID NO: 2834 - DNA, 3172 bp, Homo sapiens
ggcacgaggcggctgtgagtctgcggctcggcgacttggtgtgggggaaactcggccgatatcctccttggccaggaaagattgttaatccaccaaaggacttgaagaaacctcgcggaaagaaatgcttctttgtgaaattttttggaacagaagatcatgcctggatcaaagtggaacagctgaagccatatcatgctcataaagaggaaatgataaaaattaacaagggtaaacgattccagcaagcggtagatgctgtcgaagagttcctcaggagagccaaagggaaagaccagacgtcatcccacaattcttctgatgacaagaatcgacgtaattccagtgaggagagaagtaggccaaactcaggtgatgagaagcgcaaacttagcctgtctgaagggaaggtgaagaagaacatgggagaaggaaagaagagggtgtcttcaggctcttcagagagaggctccaaatcccctctgaaaagagcccaagagcaaagtccccggaagcggggtcggcccccaaaggatgagaaggatctcaccatcccggagtctagtaccgtgaaggggatgatggccggaccgatggccgcgtttaaatggcagccaaccgcaagcgagcctgttaaagatgcagatcctcatttccatcatttcctgctaagccaaacagagaagccagctgtctgttaccaggcaatcacgaagaagttgaaaatatgtgaagacctccttcttcctaggtgaagtgggcaatgcagccaagatgatgctgatcgtgaacatggtccaagggagcttcatggccactattgccgaggggctgaccctggcccaggtgacaggccagtcccagcagacactcttggacatcctcaatcagggacagttggccagcatcttcctggaccagaagtgccaaaatatcctgcaaggaaactttaagcctgatttctacctgaaatacattcagaaggatctccgcttagccattgcgctgggtgatgcggtcaaccatccgactcccatggcagctgcagcaaatgaggtgtacaaaagagccaaggcgctggaccagtctgacaacgatatgtccgccgtgtaccgagcctacatacactaagctgtcgacaccccgccctcacccctccaatcccccctctgaccccctcttcctcacatggggtcgggggcctgggagttcattctggaccagcccacctatctccatttccttttatacagactttgagacttgccatcagcacagcacacagcagcacccttcccctgaggccggtggggaggggacaagtgtcagcaggattggcgtgtgggaaagctcttgagctgggcactggccccccggacgaggtggctgtgtgttcacacacacacacacacacacacacacacacacacacacaggctctcgccccaggatagaagctgcccagaaactgctgcctggctttttttcttccgagcttgtcttatctcaaaccccttccagtcaaggaactagaatcagcaacgagagttggaagccttcccacagcttcccccagagcgaagaggctgtagtcatgtccccatcccccactggattccctacaaggagaggccttgggcccagatgagccagtacagactccagacagaggggcccttggggccctccaacctcaggtgatgagctgagaaagatgttcacgtctaagcgtccagtgtgcacccagcgctccatagacgcctttgtgaactgaaaagagactggcagagtcccgagaagatggggccctggctttccagggagtgcagcaagcagccggcctgcaggtgagcatggaggcccggccctcaccgcctcgaagccatgccccagatgccactgccacagcgggcgctcgctcctccctaggctgttttagtatttggatttgcattccatcccttgggagggagtcctcagggccactagtgatgagccaagaggagtgggggttgggggcgctcctttctgtttccgttaggccacagactcttcacctggctctgacttacctcggtcccctcccagtggtcccaccttctccaccctgccctgccaagtcccctgcatgcccaccgctctccatcctccctcctctccctcttcctcccgtggagacagtatttctttctgtctgtccctttggcccagacccagcctgaccaacgatgagcatttcttaggctcagctcttgatacggaaacgagtgtcttcactccagccagcatcatggtcttcggtgcttcccgggcccggggtctgtcgggagggaagagaactgggcctgacctacctgaactgactggccctccgaggtgggtctgggacatcctagaggccctacatttgtccttggataggggaccggggggggcttggaatgttgcaaaaaaaaaagttacccaagggatgtcagttttttatccctctgcatgggttggattttccaaaatcataatttgcagaaggaaggccagcatttacgatgcaatatgtaattatatatagggtggccacactagggcggggtccttcccccctcacagctttggcccctttcagagattagaaactgggttagaggattgcagaagacgagtggggggagggcagggaagatgcctgtcgggtttttagcacagttcatttcactgggattttgaagcatttctgtctgaacacaaagcctgttctagtcctggcggaacacactgggggtgggggcgggggaagatgcggtaatgaaaccggttagtcaattttgtcttaatattgttgacaattctgtaaagttcctttttatgaatatttctgtttaagctatttcacctttcttttgaaatccttcccttttaaggagaaaatgtgacacttgtgaaaaagcttgtaagaaagcccctcccttttttctttaaacctttaaatgacaaatctaggtaattaaggttgtgaatttttatttttgctttgtttttaatgaacatttgtctttcagaataggattgtgtgataatgtttaaatggcaaaaacaaaacatgattttgtgcaattaacaaagctactgcaagaaaaataaaacacttcttggtaacaaaaaaaaaaaaaaaaaa

SEQ ID NO: 2835 - DNA, 1790 bp, Homo sapiens
tcgacccacgcgtccgaataagtgcatgatgaatggcacagttgaatgatcatgttaactttaattgcttcctttgttgctgtaaacagtttcttgttaagtttcagccaagtctgtgacaatctcaccaaaatgaatgaaatgggcggggtgtggtggctcacacttggaatcccagcactctgggaggctgtgttgggccgatcgcttgagctcatgagttcaagaccaacctgggcaacatggcaaaaccttgtctctacaaaaaatacaaaaattagccaggcatggtggtgcacacctgtagtcccagctacttgggaggcttaggtgggaggatggcttgagcacgggaggcagaggttgcactaagccaagatcgtgtcactgcactccagcccaggcaatagagccagaccctgtctcaaaaaaacaaaacaaacaaaacatgaatgaatgaaatggctcaccttccctattatgaactagaagaaaggatgaaggaaggttggcaggaccccagccttactctgtagtgacaacccagaggtacctttcccggaatgcagggtcaagtttatgtgtgaagggactctagaatagctggtaaaaatggctacatggtaaccattcttgacttagtccagtattcccataatttgtaattccataaatttattctcagctgtcccccagccatttctaatagaaggatgtgtaccccagttttgacaatgttcttgaaatcaagttagtgttacctgcattgcattataatggaactatatgtacatgttaaagggatccgtttgattcctttcggcaaggaattgcaaaaatagtttttaccaataccagttaaaataggataggttagactttgggggcagggtgagacagtgcagccttttcactctgaaatggcaaatcagctgtactctttgagtctaccagagattcctatttgagtgtgaatggggtgtgtgtgtgtgtgtgtgtgctcattcatcttcatgctttcttccatggtgttaattcaagctctcctaataaaggtatccaaagagtactgagaagtgaccataggtatttggcatgagtaaatgtagttccttttgccaaaaaaactctcaaaagttacaactggagttcttcgcgataaaaggttggggaaatcagccatggctttagccttgttcccaagtacacatcttcttatccacaaggatgaaactctgtagggctcaccctgaggggctcatgtgtggcattgagagggtagcagtgaccagaacaccacaaggcccacaagatgttttgaatgagggaacatttaatgtcatttgttaggagatagaaaccaaataataaaggacaaggaccacgctcattccgtggagaagaggtgaactccctctgctgactatttggaatggactgaatgaggaggtctctccagccagaaggagtattgaggtcatcaggcctcagaaaacaatgtacacataatctcgggctgtgaacaagagaaaggagggggggaaacatgaaagtcaatcttaacaatttttgcaatacctcttatttgcagaccattggatttatgttattgcactctcggtgtgatttatcgtatgtatctgataggttttatgaattgttttgagttgtaaactcctataccctttattaaaatggacctaattaagtgaaaaaaaaaaaaaaaaaaaaaaaaaaaaaaaaaaaaaaaaaaaaaaaaaaaaaaaaaaaaaaaaaaaaaaaaaaaaaaa

SEQ ID NO: 2836 - DNA, 866 bp, Homo sapiens
tcgacccacgcgtccgaggagctggacttctgagacagccattctccttgcatagcactgtctgctgctacagctcatagaagtcaacaattttcttcaacactggtaggcagcctctaaatggccctgatcaccctcacctcctgccattcacacccttgtaaaattccacccctggacctagtgactcacttctaacaaagagaatacagcaaaagtaacatcgcttctgaggtgaggctacaaggagactacgatgcctgccttggtcacccttctcctgctctttccattgctccctctgatggaagccagttgccatgtgatgaggtgccctatggagaggcccacgtgacaaggtattgtaaaaagcctctgaccaatagccatctagaaacggaggcccagtccagcagcctctgagatgaatcctgccaacctgagcttggagacagattctctccctatcctgccttgggatgatcacagccaccaccaacaccttcactgcctggtgagaggccaagccagtgaacccaaggtaaactggacagaatcctgacccacagaaactgagataatgtttgttattttaagctgctcartttgttacagagcaatagataactaactcaaacaccataaaattctaatattttattctatcacacaaaccaggtaataccaagtaaatgccattactatacacatatttttgtaacacaattacatgtgattttttaaaaaagctaatgaactatgcattatgtgctttcacccactaaaaaaaaaaaaaaaaaaagggcggccgctctagaggatccctcgaggggctccaaacgttactgcgtgcaatgcgactgtca

SEQ ID NO: 2837 - DNA, 341 bp, Homo sapiens
  misc_feature (338)..(338): n equals a,t,g, or c
ggttgatgcaggtgttccttgggatcctcctcatcctagtattctgtgaacgtgggggtctgggtagttcacagactgggacaccctctcccagattttccagagtaaatattactcccctgatgcagcctcagccaatagcatgatccttcccatctcaggaaatgtgtccaatcagaaaacatagagggtggatccatcggtgagagatcttgccgagcggtgtcaagacttccccgtggccctatgtttaccatgcattcgattctcggtgtggtccgggcctttctcacctcatccatttcamctaccaagaaaggaaatgacattcatmcggnctg

SEQ ID NO: 2838 - DNA, 776 bp, Homo sapiens
  misc_feature (21)..(21): n equals a,t,g, or c
  misc_feature (25)..(25): n equals a,t,g, or c
  misc_feature (32)..(32): n equals a,t,g, or c
tactttaagggggatctttancggnaaactcnccctttctcattcatccatttcacctaccaagaaaggaaatgacattcatccgggctggggcactattgcgcaacaaaacaagccaacctgtaattaaggagaactgaacgctgatgctgagcccagcatcttggggaaagactgctgagagtttcgcttggctttggaattcatttatcagataacatgcgctggattgacctaaactgcaacatggcccttgtaattataccgtgcttttgctttggagcctgagggaaatgtggaaggcgctggagtctgagctctgggtcacctgaacgtcctgtgattatgcccggtctcacattcaaaaggagagatgggagtgtttgtattttacccacagcagcagactcagctctmggatatgtggggtgcatgtgtcttctgtctctcctggaactcagtatctgttcattcattcattgagtacctactgtgatcaaggcactggatggggcactatgacaatttctcttttggtattttttcaagatttgkttacttgatcttytagccmaggggtcagcaaaccacaggccatgggctagatccaggcctttgcctgtttctgtgcagcctcaatagttaagaatttttacatttttaaatgattaagaaggaaatcaaaagaagaacactattctgttacacaagaacattgtattcaatttgaattttggtgtcaataaataaagctctattagaacccaaaaaaaaaa

SEQ ID NO: 2839 - DNA, 1391 bp, Homo sapiens
ctctggagccaccagcagaacctcttcaatatcttgcatgttacagatttcactgctcccaccagcttggagacaacatgtggttcttgacaactctgctcctttgggttccagttgatgggcaagtggacaccacaaaggcagtgatcactttgcagcctccatgggtcagcgtgttccaagaggaaaccgtaaccttgcactgtgaggtgctccatctgcctgggagcagctctacacagtggtttctcaatggcacagccactcagacctcgacccccagctacagaatcacctctgccagtgtcaatgacagtggtgaatacaggtgccagagaggtctctcagggcgaagtgaccccatacagctggaaatccacagaggctggctactactgcaggtctccagcagagtcttcacggaaggagaacctctggccttgaggtgtcatgcgtggaaggataagctggtgtacaatgtgctttactatcgaaatggcaaagcctttaagtttttccactggaattctaacctcaccattctgaaaaccaacataagtcacaatggcacctaccattgctcaggcatgggaaagcatcgctacacatcagcaggaatatctgtcactgtgaaagagctatttccagctccagtgctgaatgcatctgtgacatccccactcctggaggggaatctggtcaccctgagctgtgaaacaaagttgctcttgcagaggcctggtttgcagctttacttctccttctacatgggcagcaagaccctgcgaggcaggaacacatcctctgaataccaaatactaactgctagaagagaagactctgggttatactggtgcgaggctgccacagaggatggaaatgtccttaagcgcagccctgagttggagcttcaagtgcttggcctccagttaccaactcctgtctggtttcatgtccttttctatctggcagtgggaataatgtttttagtgaacactgttctctgggtgacaatacgtaaagaactgaaaagaaagaaaaagtggaatttagaaatctctttggattctggtcatgagaagaaggtaatttccagccttcaagaagacagacatttagaagaagagctgaaatgtcaggaacaaaaagaagaacagctgcaggaaggggtgcaccggaaggagccccagggggccacgtagcagcggctcagtgggtggccatcgatctggaccgtcccctgcccacttgctccccgtgagcactgcgtacaaacatccaaaagttcaacaacaccagaactgtgtgtctcatggtatgtaactcttaaagcaaataaatgaactgacttcaaaaaaaaaaaaaaaaaaaaaaaaaaaaaaaaaaaaaaa

SEQ ID NO: 2840 - DNA, 2934 bp, Homo sapiens; identical to SEQ ID NO: 1311
  misc_feature (4)..(5): n equals a,t,g, or c
  misc_feature (8)..(8): n equals a,t,g, or c
  misc_feature (37)..(37): n equals a,t,g, or c
  misc_feature (44)..(44): n equals a,t,g, or c
  misc_feature (195)..(195): n equals a,t,g, or c
  misc_feature (2924)..(2924): n equals a,t,g, or c

SEQ ID NO: 2841 - DNA, 1130 bp, Homo sapiens
gcaatgaatggagaatggtggcttcaatgagcaaaaggagatgcggagttggggtcagtgttcttgatgatctgttatatgcagtaggaggccatgatggatcctcttatctcaatagtgttgaaaggtatgaccccaaaacaaaccagtggagcagtgatgtggcccctacaagcacctgcaggacaagtgttggtgtagcagtacttggaggctttctttatgctgtgggtggccaggatggtgtgtcttgcctcaacattgttgagaggtatgatccgaaggagaacaagtggactcgggtagcttctatgagtaccagaagactaggtgtggctgtggctgtgttaggagggttcttatatgctgtaggtggctctgacgggacatctcctctcaacacagtggaacgttacaatcctcaggaaaacagatggcacactatagcccctatggggacccggaggaaacacctaggctgtgcagtatatcaggacatgatctatgctgtaggaggtagagatgacactacagagctgagcagtgctgagagatacaaccccagaaccaaccagtggtctccagtggtggccatgacatcacgccgtagtggagttggcctggcagtggtcaatggacagctcatggcagtaggaggttttgatggcacaacatacttgaagaccatagaagtttttgatcctgatgccaatacatggaggttatatggcgggatgaattaccgtcggctagggggtggcgtaggagttattaaaatgacacattgtgaatcccatatttggtgaacacagagaagacagtcttgtatatattcctctgtattctggggagctttgaccttggagctttgtacagcttgagaaaacattagaacaaattttattatttgccggtgcctcaacaaatggaaatacaatccaatgaaagtacttcacctgcaagatgcacaataattttcaactctgtgcagaagaatatttatttttggttttaatttatcatggttttttgttgttttcgttttgaacttatccttcctcccacaaaaaaaaaaaaaaaaaaaaaaaaaaaaaaaaaaaaaaaaaaaaaaaaaaaaaaagggcggccgc

SEQ ID NO: 2842 - DNA, 143 bp, Homo sapiens
gtaatatacaagttttctttaaagccctctcctttagaatttaaaatattgtaccattaaagagtttggatgtgtaacttgtgatgccttagaaaaatatcctaagcacaaaataaacctttctaaccacttcaaaaaaaaaa

SEQ ID NO: 2843 - DNA, 780 bp, Homo sapiens
  misc_feature (671)..(671): n equals a,t,g, or c
gtttacgcccccaggccccggcccggaattcccgggtcgacccacgcgtccgcggacgcgtggktggtcctgtggctccacccctgagcccgtggggccaaacccctaccccctgcatcctcttggtgcgctctccctggaagcactcgacctctctgacccttgccaccctacaggttcctgtgagccgtgccctacgtcgtggctgcccttcgggggctcctgctactatttctctgtgccgaagaccacgtgggcagaggcgcagggccactgcgccgatgccagcgcacatctggcgatgtagggggcctgggggagcaggacttcctgagtcgtgacactagtgcccgtgaatactggatcggccgcagggccgtgcaacacctgcgcaaggttcagggctactcgtgggtggacggagtcccactcagcttcaggtaggggaagggctcctggtgaaacctgggggccacaggttagactctagaggacatgttttgaggccgaggtgggcggatcacctgaggtcaggagttcaggaccagcgtgggaaacgtggcgaaaccccatctctgctaaaaatacaaaaaattagccgggcgtggtggcacacgcctgtaatcccagctaaccctggatgctgggcacgggagtcacttgaacccggnaggcggargttgcgtgagccgarattgcgccactgcactycagcctgggagacagagttagacwycgtctcaaaaaaaaaaaaaaaaaaaaaaaaaaaaaaaaaaaaaa

SEQ ID NO: 2844 - DNA, 2577 bp, Homo sapiens
ggaaaacccatgagcattttaattctgacttttttacttttctccctacatttagaatactgtggcactttctgttatccaaatgtgtctcagtctccatatttaaggactgtgggtgaaaagcttctacctggaattgaagtgctttggacaggtcccaaagttgtttctaaagaaattccagtagagtccatcgaagaggtttctaagattattaagagagctccagtaatctgggataacattcatgctaatgattatgatcagaagagactgtttctgggcccgtacaaaggaagatccacagaactcatcccacggttaaaaggagtcctcactaatccaaattgtgaatttgaagccaactacgttgctatccacacccttgccacctggtacaaatcaaacatgaatggagtgagaaaagatgtagtgatgactgacagtgaagatagtactgtgtccatccagataaaattagaaaatgaaggcagtgatgaagatattgaaactgatgtactctatagtccacagatggctctaaagctagcattaacagaatggttgcaagagtttggtgtgcctcatcaatacagcagtaggcaagttgcacacagtggagctaaagcaagtgtagttgatgggactcctttagttgcagcaccctctttaaatgccacaaccgtagtaacaacagtttatcaggagcccattatgagccagggagcagccttgagtggtgagcctactactctgaccaaggaagaagaaaagaaacagcctgatgaagaacccatggacatggtggtggaaaaacaagaagaaacggaccacaagaatgacaatcaaatactgagtgaaattgttgaagcgaaaatggcagaggaattgaaaccaatggacactgataaagagagcatagctgaatcaaaatccccagagatgtccatgcaagaagattgtattagtgacattgcccccatgcaaactgatgaacagacaaacaaggagcagtttgtgccaggtccaaatgaaaagcctttgtacactgcggaaccagtgaccctggaggatttgcagttacttgctgatctattctaccttccttacgagcatggacccaaaggagcacagatgttacgggaatttcaatggcttcgagcaaatagtagtgttgtcagtgtcaattgcaaaggaaaagactctgaaaaaattgaagaatggcggtcacgagcagccaagtttgaagagatgtgtggactagtgatgggaatgttcactcggctctccaattgtgccaacaggacaattctttatgacatgtactcctatgtttgggatatcaagagtataatgtctatggtgaagtcttttgtacagtggttaggtaggtgcaccaggaataatctcttctcctcaaatatattgtccctttaaaaaaaattatcccacagggagaaaaacatttagggaattggcacatttccaagtctcttcaattcgttgcctaggtttctttcaaaaataggcattattgaagacttgagatgcaagtcttagtaaatacatcaagcacattaatttttctcccttgggctaattcagcataagtatcttaaaagtatgttagaaagtactgactttaacttgctctgactgaatgctttctggatggaaccctgtataccacttttatctgatttggagatgagacactatgaaatgtgactccacaagctttctgctgcttgctgtgtcttgataacattaatgctatgtttaacagaacaattgctgaaatgacctaaagggcctggcaagaggaagccatcctcccagccctgtgcgcatgcgagctttagtgtaaggctattctggtgctattcagtattatttcacgtggctttttctttatccttctaccaagtattggttttaccaggggatagaaattgtaatcccctaaacatctctgctacattaaatggacttttgtatgtctcctttgaacactgattttttttttttaaattgtcaaacttggtaaaaagcaccagcatggccaagtttctctagggacttcatttcattttcaggttttcaatccagctataaggaatatgtaatggacttatatacagcacacagcaggcagcaaggctgactgacatgtcatagttttcatagtagtcacaaatactatgatgggtttcatggtcttggttgtgaaatagatatctgaaacaccgtgagcttagaataaaaagtagtagtgagattttccactttctgcctgtatacctttgagctcttaaatatttaaaaaaaaaaaaaaaaagtttccctgtgatacaactaattagctactaaaagtagagtctcagattgttaatttgaaaatagataactttttttggattgctgtaataacaggtagaagagagtattttgacctcatgttaaaaggctctatatagctacgggcgcggttgctcaacacactataatcccagcgctaatggagaatgaggtgggtggatacaaattaaaactcaggagttcgaaaccagacatagt

SEQ ID NO: 2845 - DNA, 1273 bp, Homo sapiens
gcttcaattggaaactccagcaggacccagaaatcagtatttggtaaaacttcccaggtgattctattgccaccaaatccattgttttaaaggaatagatggtaagcttttcttttcttttttttttcttttctttttttgagacaaggtctcactctgtcacccaggctggaatgcagtggcacaatcacagctcactgcagccttaccctcctggcctcaaacaatcctcccacctcagcctcccaagtagatgggactacaggtgtgtaccaccacaactgcttactttttgtattttttgtagagacagggtttcaccatgttgcccaggctggtctaaaactcctgggctcaagtgatccacctgttttaacctcccaaagtggtgggattacaggcatgagccactgcgcctggtcagatggtaaagcttttaaaaaaccagattagtgttagtgatggttgcacaatatgaatgtacttaacactactgaactgtatacttacaaatggttaagatggtaaatttttatgttaggtgtactttatcacaatacaaaaatttgggaaaaaacagattaggacactctagatttgtgctgtccaatacagtagccattagccacatgtgactatcaaatgcttgaaatatggctagttcaaattgagataataaatcaagataagtgaaaaatacgcaccasattttgaaggcttattgtgaataaaagaataaaatatttcactagtaatttttatattgcttacatggagacagtattttttatcttttaggataaacaaaatatattaaaaataatttcactttttctttacttttttaatgtggttaccacaatatataaaatgacatatgtggcccccattgtttctactagacagcattgctctaaatttaaaactaaactagcagtcaattaattaaaaaggatgataaggggccgggcacagtggctcacacctgtaatcccagcactttgggaggccgaggtaagtggatcacgaggtcaggagatcgagaccatcctggctaacgcggcgaaaccccgtctctactaaaaatacaaaaaagtagccgggcgcggtggcgggcgcctgtagtcccagctactcgggaggctgaagcaggagaatggcgtgaacccgggaagtggagcttgcggtgagccaagattgcgccactgcactctgcactccagcctgggcgacagagggagactccgtctcaaaaaaaaaaaaaaaaaaaaag

SEQ ID NO: 2846 - DNA, 1762 bp, Homo sapiens
cccacgcgtccgcacccgtattgccaagacaagagtccattgaaaacccagcaggaaatacctactcctgaaggggagactcacttcctgctcatggtccctttcaaaagagagtcccccattggcagaactgtggaggccatgacacccctgtgtaacattcttaaatgctcccccggctgcagccatgctacattgttcccattcacatttcaggtccaatttattccctcatccattccttctttcgacaatagttctgggactcgttctttgtgtgggtgctgcgctgggcccagtgaaagtcaggataggtaaacagatatggattcagggtttgattctatcactgtgagctgtgtagcctgggggggaaaaaaatctatgcaacttcctgagtttcctctgtttgctcatccataaaatggtgacgatgttaatatccatctcatagacttcagtattacacctgcacatggacatggtttaataaattccatacccttgggctgggtgtgggggctcacatctgaaatcccagcactttgggaggctgagacaggcggatcacttgaggtctggagttcaagaccagcctggccaacatgatgaaaaatacaaaaattagctctgccaaaaatacaaaaattagctgggcatggtggcgggtgcctgtagtcccagctactcaggaggctaaggcaggagaatcacttgaacccaggaggtggacgttgcagtgagccgacattgcgccactgaatcccagcctgagcaacagagtcagattctgtctcaaaaaaaaaaggaagaagggaagagaggcaaggctcataagacccatccccaacccttcccccacctgcaccccaggacactggggtgctgacatggtcctctcggattcagggcaagtactttgagatccagttcagccgaggtggggagccagatgggggcaagatctccaacttcttgctggagaagtcccgcgtggtcatgcaaaatgaaaatgagaggaacttccacatctactaccaggtgcagggaaggggccgggggagagggagcaccacctggagcccagcggggtggacaatgggaaggtaaacacctaggggggcatggcagggcagatgagggatcacaggggctgagccaggcaagcaccagatgcatgaacatggcacaccctccagctgctggaaggggcctcccaggagcaaaggcagaacctgggcctcatgacaccggactactattactacctcaaccaatcggacacctaccaggtggacggcacggacgacagaagcgactttggtgagactctggtgagcaccggcctctactccagtccccggccaggcagacctcagccccagaaaccctcctgagttacaaattaggaaaccgaagcccaggccaggcatgtggctcaagcctgtaatcccagcactttgggaggccgaggcaggtagatcacttaaggtcaggagtttaagaccggcctggccaacgtggttaaaccccgtctctacttaaaatacaaaaattagccagatgtggtggcgtgtgactgtaatcccagctactggggaggcagaggcaggaaaattgcttgaaaacgggaggtggaagttgcagtgagccgagatcacactactgcactccagcctgggcaacagagtgagactacatctcaaaaaaaaaaaaaaaaaaaaaaaaaaaaaaaaaaaaaaaaaaaaaaaaaaaaaaaaaa

SEQ ID NO: 2847 - DNA, 548 bp, Homo sapiens
ctgcaccccaggacactggggtgctgacatggtcctctcggattcagggcaagtactttgagatccagttcarccgargtggggagccagatgggggcaagatctccaacttcttgctggagaagtcccgcgtggtcatgcaaaatgaaaatgagaggaacttccacatctactaccaggtgcagggaaggggccgggggagagggagcaccacctggagcccagcggggtggacaatgggaaggtaaacacctaggggggcatggcagggcagatgagggatcacaggggctgagccaggcaagcaccagatgcatgaacatggcacaccctccagctgctggaaggggcctcccaggagcaaaggcagaacctgggcctcatgacaccggactactattactacctcaaccaatcggacacctaccaggtggacggcacggacgacagaagcgactttggtgagactctggtgagcaccggcctctactccagtccccggccaggcagacctcagccccagaaaccctcctgagttacaaattagg

SEQ ID NO: 2848 - DNA, 1450 bp, Homo sapiens; identical to SEQ ID NO: 2217
  misc_feature (35)..(35): n equals a,t,g, or c
  misc_feature (60)..(60): n equals a,t,g, or c
  misc_feature (82)..(82): n equals a,t,g, or c
  misc_feature (1293)..(1293): n equals a,t,g, or c
  misc_feature (1296)..(1296): n equals a,t,g, or c
  misc_feature (1303)..(1303): n equals a,t,g, or c
  misc_feature (1331)..(1331): n equals a,t,g, or c
  misc_feature (1439)..(1439): n equals a,t,g, or c
  misc_feature (1441)..(1441): n equals a,t,g, or c

SEQ ID NO: 2849 - DNA, 953 bp, Homo sapiens
  misc_feature (19)..(19): n equals a,t,g, or c
  misc_feature (54)..(54): n equals a,t,g, or c
  misc_feature (62)..(62): n equals a,t,g, or c
ccggccccagcccctctcnccacccctgaggacatcgtcactttacatcytggnccgcctgnccggcctkgacgcaggcytgcaccagctgcacgtccgtctgcacgcgttggacacccgmgtggtcgagctgacccagggctgcggcagctgcggaacgcggcaggcgacacccgcgatgccgtgcaagccctgcagraggcgcagggtcgcgccgagcgcgagcacggccgcttggagggctgcctgaaggggctgcgcctgggccacaagtgcttcctgctctcgcgcgacttcgaagctcaggcggcggcgcaggcgcggtgcacggcgcggggcgggagcctggcgcagccggcagaccgccagcagatggaggcgctcactcggtacctgcgcgcggcgctcgctccctacaactggcccgtgtggctgggcgtgcacgatcggcgcgccgagggcctctacctcttcgaaaacggccagcgcgtgtccttcttcgcctggcatcgctcaccccgccccgagctcggcgcccagcccagcgcctcgccgcatccgctcagcccggaccagcccaacggtggcacgctcgagaactgcgtggcgcaggcctctgacgacggctcctggtgggaccacgactgccagcggcgtctctactacgtctgcgagttccccttctagcggggccggtaccccgcctccttgcccatcccaccacccggcctttccctgcgccgtgcccaccctcctccggaatcgcccttcccttcctggccacgaatggcagcgtcctccccgacccccagtctgggcgcttctgggagggctcttgcggtgccggcactcctccttgttagtgtctttccttgaaggggcgggcaccaggctaggtccggtgccaataaatccttgtggaatctgaaaaaaaaaaaaaaaagggcggccgc

SEQ ID NO: 2850 - DNA, 1382 bp, Homo sapiens; identical to SEQ ID NO: 2219
  misc_feature (34)..(34): n equals a,t,g, or c

SEQ ID NO: 2851 - DNA, 2223 bp, Homo sapiens
attatcatagaagcatgctgccctccaaggcttttgaatttgccaccgtgaagagcatgcatggaatcttcggctgtggccttgcattgccccctgtcttcgcagcggagcttctttatctgacccgtgcatgtgcctctgatgagcagcccttcatcacagctctgcggcctcctcctaggcccccgccttcagctctccagttcatttcccgccttgttcccattgccacctgcgggcttggagggccacctgacattctgtcctttgggtcccctgtgactccagagctccttcccttctggggcgcccacatctgcgacacgcttgtttgcccagtgcattttctacacttagagttcctctcgtgctctcatatttccatttaaagccctctcgagaggtctgtctcctgccagcagcattccttctagtttactagaactccatttctcatcctgccaggaatccagccgtggagtgagcttcagcaagcctctctgcagtctcttgtctgctccaaaactgtggcctctggttgtgagaaatgggcatcctgagtcagtgagagcagtagttagcttgcagcagcttcccctctccccctgagtgagcctttcttcctcttcctcctctttcattcagcctcatcctgccttgggtccatttgacagataatggcaccttgaggccttgtcttttgcatggcatctgtgcctgactggtcagaaattacttgtgaagcaacatagggggttgttggttgggtccacttttaggatgaagtcagaagggatcgtgagtgatgcttggccaataagaatgtattgatttgatttactaattaatttcatttccagacaccaatatatgcatagccttgtttgaagaaaattaaggagaaccattttgtaaatggcaatgagtgtaagacacttaactatcttcctgctctccctggcgtgggcttccgcgctccctgactctgcttttatttaaggtgtctgggaaggcatttgtccttcggcttcccagctggcttcttgccttctcactcactgcctcccgtagcctgtgggcagaatccctcaccgtgcccaccttgccctgctctcgtctgacctcacctctgtttccaggatttgctatggctgtcccctgccagtcatgctctgtgcttgctactctgagtgtgtccctggtcccactctcttgcagcctctgtgtcttagcacatgctgccctgatggcccaagggcccttcccctttgtttctgtctggggaatgttctgtctcctctttcttgaacctccttatattccctcaagaagacttaaggcaaaaacaaacctgaacttactatgtgtggtatytttgtgttataagtgtaggacctagtcatagtaacacatttcaaaaatatggaaccgtataaagaaaatgagcatcactcataaatcactatttagacacaagcattgtttacgtttctaatattctttctttagtggtgcttttcatgattttatgtgcatttgcattttactgactaaatattactatataaacattttcatatcttgccacttcacctaacaatacagcacaagcagcttctcatggcattaagaattgtttgtacatgtaattttgaatggctgtatgctgtttcatcttcagaatataccataattctaatttttcatcattataaatagcactgtgacgaacatccttcttaacaaaattctttgtctgcacctatgattattttctaaggtagattattagaatttgaaatgccttgcacaaaggacagtaactttttcacccttagtttcagagagaacatgttgtctctggagaaacacagaaacatgaaaaagcacaaagaagaaaataggcctggcacggtggctcatgcctgtaatctcagcacttttggaggccgaggtgggcggatcacgaggtcagggattcgagaccagcctggccaatatggtgaaaccccgtctctactaaaaatacaaaaactagctggacttggtagcgcatgcctgtaatcccagctactcaggaggctkagacaggagaattgcttgaatccgggaggcagaggttgcagtgagctgagattgtatcmctgcmctccagcctgggtgacaaagtgaaattccgtctccaaaaaaaaaaaaaaaaaaaaaaaaaaaaaaaaaaaaaag

SEQ ID NO: 2852 - DNA, 2227 bp, Homo sapiens
cgattatcatagaagcatgctgccctccaaggcttttgaatttgccaccgtgaagagcatgcatggaatcttcggctgtggccttgcattgccccctgtcttcgcagcggagcttctttatctgacccgtgcatgtgcctctgatgagcagcccttcatcacagctctgcggcctcctcctaggcccccgccttcagctctccagttcatttcccgccttgttcccattgccacctgcgggcttggagggccacctgacattctgtcctttgggtcccctgtgactccagagctccttcccttctggggcgcccacatctgcgacacgcttgtttgcccagtgcattttctacacttagagttcctctcgtgctctcatatttccatttaaagccctctcgagaggtctgtctcctgccagcagcattccttctagtttactagaactccatttctcatcctgccaggaatccagccgtggagtgagcttcagcaagcctctctgcagtctcttgtctgctccaaaactgtggcctctggttgtgagaaatgggcatcctgagtcagtgagagcagtagttagcttgcagcagcttcccctctccccctgagtgagcctttcttcctcttcctcctctttcattcagcctcatcctgccttgggtccatttgacagataatggcaccttgaggccttgtcttttgcatggcatctgtgcctgactggtcagaaattacttgtgaagcaacatagggggttgttggttgggtccacttttaggatgaagtcagaagggatcgtgagtgatgcttggccaataagaatgtattgatttgatttactaattaatttcatttccagacaccaatatatgcatagccttgtttgaagaaaattaaggagaaccattttgtaaatggcaatgagtgtaagacacttaactatcttcctgctctccctggcgtgggcttccgcgctccctgactctgcttttatttaaggtgtctgggaaggcatttgtccttcggcttcccagctggcttcttgccttctcactcactgcctcccgtagcctgtgggcagaatccctcaccgtgcccaccttgccctgctctcgtctgacctcacctctgtttccaggatttgctatggctgtcccctgccagtcatgctctgtgcttgctactctgagtgtgtccctggtcccactctcttgcagcctctgtgtcttagcacatgctgccctgatggcccaagggcccttcccctttgtttctgtctggggaatgttctgtctcctctttcttgaacctccttatattccctcaagaagacttaaggcaaaaacaaacctgaacttactatgtgtggtatttttgtgttataagtgtaggacctagtcatagtaacacatttcaaaaatatggaaccgtataaagaaaatgagcatcactcataaatcactatttagacacaagcattgtttacgtttctaatattctttctttagtggtgcttttcatgattttatgtgcatttgcattttactgactaaatattactatataaacattttcatatcttgccacttcacctaacaatacagcacaagcagcttctcatggcattaagaattgtttgtacatgtaattttgaatggctgtatgctgtttcatcttcagaatataccataattctaatttttcatcattataaatagcactgtgacgaacatccttcttaacaaaattctttgtctgcacctatgattattttctaaggtagattattagaatttgaaatgccttgcacaaaggacagtaactttttcacccttagtttcagagagaacatgttgtctctggagaaacacagaaacatgaaaaagcacaaagaagaaaataggcctggcacggtggctcatgcctgtaatctcagcacttttggaggccgaggtgggcggatcacgaggtcagggattcgagaccagcctggccaatatggtgaaaccccgtctctactaaaaatacaaaaactagctggacttggtagcgcatgcctgtaatcccagctactcaggaggctgagacaggagaattgcttgaatccgggaggcagaggttgcagtgagctgagattgtatcactgcactccagcctgggtgacaaagtgaaattccgtctccaaaaaaaaaaaaaaaaaaaaaaaaaaaaaaaaaaaaaaggg

SEQ ID NO: 2853 - DNA, 2421 bp, Homo sapiens
ccacgcgtccgcaaagtagccctccattgtgtatatgtactacactttctttatccactcatctgttgagggacacttaggttgcttccaaatcttgtctattgtgaacagtgctgcaaccaacatgggagtgcagatatctcatccatataccgatttcctttctttacagtatataccccccagtgagattgctgggtcaaatcgtagttctgtttttagttttttgaggaacctccaaactgttcttcatagtgtttgtactaatttacattcccaccaacagtgtacaagtattgccttttctccacatcctcaaaaacatttcttattgcctgttttttggttaaaagccattttgactgagatgagctgttatctcattgtagttttgatttgcatttctctgatgatcagtgatgttgagcaccttttcatatgcacacttgccatttgtatgtctgcctttgagacatgtctattcaaatattttgaccattttttgaatggtttattagatttttttcctctagagttgtctgagctcctgatatattctggctatcaatcctttgtcagatgggtagtttgcaaatattttctgtcattctgtgggttgtctcttcacttcgttgcctgtttcctttgctgtgcaaaagctttttaccttgatgtgatcacatttgcttatttttgctttggttgtctgtgcttatagggtattgctcaagaaatttttggccagaccaatgtcttgtagattttccccaatattttcttacagtcataatgtgattttaattaccaccgttcattccacaaattattgattgaacacctgacaatatgatggtgaagtaagttcttgcccccctggaacatatagttgggtggcaatagttgacagagtgattttacacactttatatataaaacatgtgtatacatatgtatttaaagatatatacactgtataatgtatatgtacattattcacatataagcatatggcatgcattatacacttatatatacatattttatacatgatctaaatctaaactatgctttaagatggaattattatctctctcttagcaaacaaaaagccatggctcagaaatattaaacattttacccaaagacatgtacaactaataagtggttgacatgaggctcaaatgtaggttcgagttttgaccccaaatcatagcatacattgaagtatcctaaatacttcaagcatcattggatgacatgtcatacaataatggaggaggcctgcaagtctgaggcaggccggattcttcacaatcccaaaccttattccaccagaagagaaaccaaagggaagtgtgtttcctcacaaatacattcatgcagatcctcagggccttcagctttcccattcattactccacatggcaactggctaaatatttttgactcttcctcattgggatgatactgataccagttcattgtcatttttccaagaatagagaggatgaaaactcaaagcatggaagacattcatacatggccatctgtcaagatacttaataatacaacctctcatttgtagagcacattcgaacttataaaatcttatccaaattatttcatttcatatgttctagaaatctctgaggtagtcattcttatcattttagtgctgggaactgagccttagagagggcaagtggcttacacaagtgtgggcagtaagaaagtcatagaaccagctgggcgcgatggctcacacctgtaatcccagcactctgggaggctgaggcagaaggaacacgagatcaggagttcaagaccagcctggccaacacggtgaaaccccgtctttactgaaaaaaataacataaatattagctgggtgtggttgtgcacacctgtaatcccagctacctgggaggctgaggtgggagaattgcttgaacctgacaggcggagcttgcagtgagctgagatcatgcaattgcactccagcctgggtgacagagggagaacctgtctcaaaaaaataaaaataaaaataaaatttaaaaaaagagacagagagagagtgcttgagctagatcatctaagattcagccaaccatctcagcagtgttaccagagcttgtaagtgaaggcagatttggggtaaaaccagcttttatttatatgtgtcttcagtgagtcagattagttggtttgcaggccatattttgaaaaccactaggctttagaatatttaattctttctccaattctgactaaccctcccaagaattgaaatgttctaaaaccctgaaaaatgaaaacccttccaaccgaacaccaataattatcatttttgtatttttctcctcaaaataggcaattaaacatgtaaaaataaataaagacttcaaaaaaaaaaaaaaa

SEQ ID NO: 2854 - DNA, 648 bp, Homo sapiens
  misc_feature (612)..(612): n equals a,t,g, or c
tccggtttaaatracgggatcctacggaaggagcttcggaaaaagttgcctgtgtcgctgtcccagcagaagctgctgacatggctgagcgtgctggagtgcgtggaggtgttcatggagatgggwgctgccaaggtgtggggtgaagtgggcygctggcttgtcatcgccctcatccagctggccaaggctgtactgcggatgctcctgctgctctggttcaaggctggcctccagacttcaccccctatcgttccactggacagagagacccaggcacagcccccggatggtgaccacagccctggcaaccatgagcagtcctacgtggggaagcggtcaaaccgggtggtgcraaccctccagaacacctgagcctcctgagtgacagaaagggcctgacccggarggagcggcgggagctgcggcgccggaccatcctgctgctctactacctgtgcgctctcctttctacgaccgsttctccgaggccargatcctcttcctgytccagttgytggccgamcacgtccctggcgttggcctggtcacaaggccgctcatggattacttgcccacctggcagaaaatctacttctacagttggggctnacagacctcccggaaggagggtgtggggaggggtgg

SEQ ID NO: 2855 - DNA, 4270 bp, Homo sapiens
  misc_feature (911)..(911): n equals a,t,g, or c
  misc_feature (4239)..(4239): n equals a,t,g, or c
ggcgcctcctcgggctccacgcgtcttgccccgcagaggcagcctcctccaggagcggggccctgcacaccatggcccccgggtgggcaggggtcggcgccgccgtgcgcgcccgcctggcgctggccttggcgctggcgagcgtcctgagtgggcctccagccgtcgcctgccccaccaagtgtacctgctccgctgccagcgtggactgccacgggctgggcctccgcgcggttcctcggggcatcccccgcaacgctgagcgccttgacctggacagaaataatatcaccaggatcaccaagatggacttcgctgggctcaagaacctccgagtcttgcatctggaagacaaccaggtcagcgtcatcgagagaggcgccttccaggacctgaagcagctagagcgactgcgcctgaacaagaataagctgcaagtccttccagaattgcttttccagagcacgccgaagctcaccagactagatttgagtgaaaaccagatccaggggatcccgaggaaggcgttccgcggcatcaccgatgtgaagaacctgcaactggacaacaaccacatcagctgcattgaagatggagccttccgagcgctgcgcgatttggagatccttaccctcaacaacaacaacatcagtcgcatcctggtcaccagcttcaaccacatgccgaagatccgaactctgcgcctccactccaaccacctgtactgcgactgccacctggcctggctctcggattggctgcgacagcgacggacagttggccagttcacactctgcatggctcctgtgcatttgaggggcttcaacgtggcggatgtgcagaagaaggagtacgtgtgcccagccccccactcggagcycycattctgcaatgccaactccatctcctgnccttcgccctgcacgtgcagcaataacatcgtggactgtcgaggaaagggcttgatggagattcctgccaacttgccggagggcatcgtcgaaatacgcctagaacagaactccatcaaagccatccctgcaggagccttcacccagtacaagaaactgaagcgaatagacatcagcaagaatcagatatcggatattgctccagatgccttccagggcctgaaatcactcacatcgctggtcctgtatgggaacaagatcaccgagattgccaagggactgtttgatgggctggtgtccctacagctgctcctcctcaatgccaacaagatcaactgcctgcgggtgaacacgtttcaggacctgcagaacctcaacttgctctccctgtatgacaacaagctgcagaccatcagcaaggggctcttcgcccctctgcagtccatccagacactccacttagcccaamacccatttgtgtgcgactgccacttgaagtggctggccgactacctcaggacaaccccatcgagacaagcggggcccgctgcagcagcccgcgccgactcgccaacaagcgcatcagccagatcaagagcaagaagttccgctgctcaggctccgaggattaccgcagcaggttcagcagcgagtgcttcatggacctcgtgtgccccgagaagtgtcgctgtgagggcacgattgtggactgctccaaccagaagctggtccgcatcccaagccacctccctgaatatgtcaccgacctgcgactgaatgacaatgaggtatctgttctggaggccactggcatcttcaagaagttgcccaacctgcggaaaataaatctgagtaacaataagatcaaggaggtgcgagagggagctttcgatggagcagccagcgtgcaggagctgatgctgacagggaaccagctggagaccgtgcacgggcgcgtgttccgtggcctcagtggcctcaaaaccttgatgctgaggagtaacttgatcggctgtgtgagtaatgacacctttgccggcctgagttcggtgagactgctgtccctctatgacaatcggatcaccaccatcacccctggggccttcaccacgcttgkctycctgtccaccataaacctyctgtccaaccccttcaactgcaactgccacctggcctggctcggcaagtggttgaggaagaggcggatcgtcagtgggaaccctaggtgccagaagccatttttcctcaaggagatccccatccaggatgtggccatccaggacttcacctgtgatggcaacgaggagagtagctgccagctgagcccgcgctgcccggagcagtgcacctgtatggagacagtggtgcgatgcagcaacaaggggctccgcgccctycccagaggcatgcccaaggatgtgaccgagctgtacctggaaggaaaccacctaacagccgtgcccagagagctgtccgccctccgacacctgacgcttattgacctgagcaacaacagcatcagcatgctgaccaattacaccttcagtaacatgtctcacctctccactctgatcctgagctacaaccggctgaggtgcatccccgtccacgccttcaacgggctgcggtccctgcgagtgctaaccctccatggcaatgacatttccagcgttcctgaaggctccttcaacgacctcacatctctttcccatctggcgctgggaaccaacccactycactgtgactgcagtcttcggtggctgtcggartgggtgaaggcggggtacaaggagcctggcatcgcccgctgcagtagccctgagcccatggctgacaggctcctgctcaccaccccaacccaccgcttccagtgcaaagggccagtggacatcaacattgtggccaaatgcaatgcctgcctctccagcccgtgcaagaataacgggacatgcacccaggaccctgtggagctgtaccgckgtgcctgcccctacagctacaagggcaaggactgcactgtgcccatcaacacctgcatccagaacccctgtcagcatggaggcacctgccacctgagtgacagccacaaggatgggttcagctgctcctgccctctgggctttgaggggcagcggtgtgagatcaacccagatgactgtgaggacaacgactgcgaaaacaatgccacctgcgtggacgggatcaacaactacgtgtgtatctgtccgcctaactacacaggtgagctatgcgacgaggtgattgaccactgtgcgcatcaacaacgagctgcaggacttcaaggccctcccaccacagtccctgggggtgtcaccaggctgcaagtcctgcaccgtgtgcaagcacggcctgtgccgctccgtggagaaggacagcgtggtgtgcgagtgccgcccaggctggaccggcccactctgcgatcaggaggcccgggacccctgcctcggccacagatgccaccatggaaaatgtgtggcaactgggacctcatacatgtgcaagtgtgccgagggctatggaggggacttgtgtgacaacaagaatgactctgccaatgcctgctcagccttcaagtgtcaccatgggcagtgccacatctcagaccaaggggagccctactgcctgtgccagcccggctttagcggcgagcactgccaacaagagaatccgtgcctgggacaagtagtccgagaggtgatccgccgccagaaaggttatgcatcatgtgccacagcctccaaggtgcccatcatggaatgtcgtgggggctgtgggccccagtgctgccagcccacccgcagcaagcggcggaaatacgtcttccagtgcacggacggctcctcgtttgtagaagaggtggagagacacttagagtgcggctgcctcgcgtgttcctaagcccctgcccgcctgcctgccacctctcggactccagcttgatggagttgggacagccatgtgggaccccctggtgattcagcatgaaggaaatgaagctggagaggaaggtaaagaagaagagaatattaagtatattgtaaaataaacaaaaaatagaacttatttttattatggaaagtgactattttcatcttttattatataaatatattacaccatctgcgtatatgtaccatatagtgagttatttttaccaagttttgtgttgtgtatttgttgtgtttttaaaaatagctgtttaaaaatttaagaaaaaaatagactaataaaaatgctttaaaacaaaaggataagaataaagaatgatagcctgtctgaggaaaaaaaaaaaaaaaaaaaaaaaagnaaaaaaaggaaaaaaaaaaaaaaaagggggg

SEQ ID NO: 2856 - DNA, 1699 bp, Homo sapiens
  misc_feature (1501)..(1501): n equals a,t,g, or c
  misc_feature (1575)..(1575): n equals a,t,g, or c
  misc_feature (1609)..(1609): n equals a,t,g, or c
  misc_feature (1653)..(1653): n equals a,t,g, or c
  misc_feature (1681)..(1682): n equals a,t,g, or c
  misc_feature (1698)..(1698): n equals a,t,g, or c
cccacagcccccacgacattccatgatgggcaccttggaggctgtggcacatgatgcataacctttctggcggcggatcacctctcggactacttgtcccaggcacggattctcttgttggcagtgctcgccgctaaagccgggctggcacaggcagtagggctccccttggtctgagatgtggcactgccctggtgacacttgaaggctgagcaggcattggcagagtcattcttgttgtcacacaagtcccctccatagccctcggcacacttgcacatgtatgaggtcccagttgccacacattttccatggtggcatctgtggccgaggcaggggtcccgggcctcctgatcgcagagtgggccggtccagcctkggcggcactcgcacaccacgctgtccttctccacggagcggcacaggccgtgcttgcacacggtgcaggacttgcagcctggtgacacccccagggactgtggtgggagggccttgaagtcctgcagctcgttgttgatgcgcacctcatggatgcatccgtggaagccgcctagaggccggtccgtgccctggcgcaaggcggagaggccggtggaggtggggatgcctccaaggtagagggggctgttgatgcccactgctggctgcttctgragcttccccaggctctttggagttcctttgtccactactaggttcagggtctggttwagcgtcaccagctccacactgtgaaactgcccatcattcactgtctccacactgtacactgtggttggargggaactcaggctgtcatagaccagccgcacgtggccctggtacagctccagtgccagggggtcattgtctcctttgtagagaaggatgccgttgtccttgtcagtggccacctgcagggagatgttggcctggggtcggaccttggcggaggccagttccacgtaggagtctttgcccacgaagttgacagtgatgagcttctcgcatctggggccggcgaagcctggtgggcagcggcaggtgggctcctgctgcaccacgatgcactgggccccgttctggcactcgtactggtcgcatgggctggtctgcagtaggaccatgggtggggggtgttcacagaagggtccactgaagccctgggggcaggtgcatgtgtagccattgattgtgtccacgcactgggccccgtggcggcacttgtgggccacacagtcatcattgtctgtctcacagagcttcccgctgtagccagggacacactcgcagctgaatcctwtgtccagggggatgcacttggcctcatgctgacagaggttcagctcaggcacacagtggtcaatcacctcgtcgcatagctcacctgtgtagttaggcggacagatacacacgtagttgttgatcccgtccacgcaggtggcattggtttcgcaagtcgttgtcctcacagtcatctgggttgatctcacaccgctgcccctyaaagcccagagggcangarcagctgaacccatccttggggctgtcactcaggtggcaggtgcctcatgctgacaggggttctggatgcangtgttgatgggcacagtgcaatccttggccttgnacttgaagggcaggcacagcggtcagttcacagggtcctggtgnatgtcccgtattcttgacgctgaaagannattgattggccatgtnt

SEQ ID NO: 2857 - DNA, 4538 bp, Homo sapiens
agcggccgcggagatgcggggccaggctccggggccgcktcagggacggtggtcgcggcggcggcgggaggccykggcccgggggccgggggagtggcggcggctggcccggcccctgcgccgccgactgggggctcgggcggctcgggcgctgggggttcgggctcggctcgagagggctggctcttcaaatggaccaattatatcaaaggctaccagcggcgatggttcgtgctgagcaacgggctcctgagctactacagatcaaaggcagaaatgagacatacctgccgtggtaccatcaacctcgccacagccaacatcaccgtggaggactcctgcaacttcatcatttccaatgggggtgctcagacctaccatctgaaagctagttcagaagttgagcggcagcgctgggtgacggccctggaactggccaaggccaaagctgtgaagatgctggcagagtcagatgaatcaggagatgaagagtctgtctcacaaactgacaagactgagctgcagaatacccttcggaccctctctagcaaagtagaggacttgagcacgtgcaatgacttgatagctaagcatggcacagctctgcagcgttctctcagtgagctggagtccctgaagttgcctgctgagagcaatgaaaagatcaaacaggtcaacgaacgagccacactctttaggataacatccaatgccatgatcaacgcctgcagagatttcctcatgttagcccagacccatagtaaaaaatggcaaaagtcactacagtatgaaagagaccagcgtatccgactggaagaaaccctcgagcagctggcgaagcagcataatcacctggagagggccttccgaggagccacggtgctgccggcaaacactcctggcaatgtgggttctggtaaagatcagtgctgctctggcaaaggggacatgagcgatgaagatgatgagaatgaattttttgatgcacctgagatcatcaccatgcctgaaaatttgggccacaaacgtactggcagcaatatcagtggagccagcagtgacatcagccttgatgaacagtacaagcatcagctggaggagaccaaaaaggaaaagagaaccagaataccatacaagccaaactatagcctcaatttatggagcatcatgaagaactgcattggaaaagaactctctaagatccccatgccggtaaactttaatgagcccttgtccatgcttcagcgccttactgaagatctggaataccatgagctgttagaccgagctgcaaaatgtgagawttctctagaacagctctgttatgttgcagctttcaccgtgtcctcctactccactactgtyttccgcaccagtaagccattcaacccactgcttggggagacctttgagctggaccgwttagaggagratgggtaccgatccctctgtgaacaggtgaagtcatcatccccctgctgctgcgcaccatgctgagtccaaaaatggctggacattgcgtcaggaaatcaaaatcaccagcaagtttcgaggcaaatacctctccattatgcccctcggtaccattcattgtattttccatgcaactgggcaccactacacttggaagaaagttaccacaactgtacacaacattattgtgggcaagttgtggatagatcagtctggcgaaattgatattgtgaatcacaagacaggagacaagtgtaatcttaaatttgttccttatagctacttctctcgggatgtagcaagaaaggtgacgggggaagtgacagatccatcaggaaaagtccactttgctcttctggggacgtgggatgagaaaatggaatgtttcaaagtacagccagtcattggggaaaatgggggtgatgctcgacagagaggccatgaagcagaggaaagcagggtcatgctgtggaaaaggaatcctttaccgaagaatgcagaaaacatgtactacttctcagagcttgctctgactctcaatgcttgggaaagtggcactgccccacagacagccggttacgacctgaccagagactgatggaaaatggacgctgggatgaagcaaatgcggagaagcagcgcctggaggaaaaacaaagactttccagaaagaagagagaagcggaagctatgaaagccacagaggatggcacaccatatgatccctataaggcactgtggtttgagcggaagaaggaccctgttaccaaggagttaacccatatttataggggagaatactgggagtgtaaagaaaaacaggactggagctcatgcccggacattttctgaaacggcagtaacaaaaaagaggagcatataatggagaagaggacagaggatgtgtgggaaagctggaagttgtgactctcttaccaagtgctttcctcaagtttgtctctcttgaccaatcattttttccaaatcaatcaccagaaggagacaccagtggtggtgattggctggttgccttagctgattgaaactgaaatcgacataggagatactatgtctgtaagggagaggtttagtggccgaaggttagtgttattccacatccacgaagtcaagtattcttggctcttctttctccctctgcccccatttaagacaatgtcactcaccctccccttgtagtatcctgctcagccaagatctgcctaagattatgattcaggggcattttggtgctgttaaaagcaagagccgaatttagaagttcccttaaaaagaaacacataagacttaccaatggaggcattgtgaatggttgcagtggagcttaggtataacatcatcaagtgtgttcacacgcggggtcggtttaatggagtgtccacgcggagataactgcgatattggaacacctgtgagagagattgttctatagggctggaatattcagagttacattcttggaagtttctgtttttacttgcatcaaacacccctctgttgttctccatcatctttaatagcaactggagaccactttggtcattggtaagggggtgcattctcctcacaaaggggttttatggacttcctcaggcggagagcttctgagaacacaggcaggatggaaaaagactactagccacttttgctttcccaaccccccttaatgccatccttcattgtctttctggcttctcttcttctggcacagtaccattttgggtctgtgccccagtgtggagcaaaacattgcctgtcccattctgatatacttcagaatttgagagcagaagttaatgtggaacaaaagttttcaccatctctcaagccccaaggactggagccacctctggaataatgtgttaaatatctgtatattatatatatgtagagaaaaatctaattttttggtttgatttccttcccattaagaatcttgttttttgatacccttgtctccctgagactctttcttggacacgtgttgatgtggatggcactcctgctctccatcttttatgggcagagagatttcaaaacctgagcaggatcatgtctggcagttactaaacagggactttgtccatggtttgtatcatggggtgcctactgctgtctaaactctgctctcctaattagctgactcttgaaaatgaaatcctaacctctttcctgcctcttttctttctcttttcaggaagagtgtgggtagaaagtccggagggcaacttccaatttaattctgctctgtccggcgcataggctgaattccaaaagaactttcttcctaggatgtggggcttaaagcaccgtcatgtggggtggatcagataattgctcctgtggggccctggcttccttctctgtttgtgcagtatttgtttttgttgtcttgttgagaaatatcccctgtgcaacccacccttggttgaggatcacaaattgaggtgccttccttgtatgctttttgttagtattttttgtttttgttccttaactgctgagcctcagccagcgtgggtcctgggggaaataccattccaaaggaagccatccctatggggaaattggttttactgggtaaattaatacttttatttcttcccctatcccttccttcctagttgtgataaacatgggagaggagtgactttgactgctggggaatttcctcctaagaaccttattcccaaaataagccagggattatgtcaaggcttctttcaaggaggctcataaaagcagtgacctcatccggggctttggatagagtgagaattccccaactaaattggacttctctgctttatccccttctcttccttcaccatctgcactacatttctggctgatcccaatcagattcccgctaatggaagaagtttagaatctttcaggtggaataaagtcacatgaaaacaaaacacaactatatatattttcagtttttttgccttattgatttttttccaaaaaaaaaaaactactaaattaaataattttttaaaagtcaaaaaaaaaaaaaaaaaaaaaaaaaaaaaaaaaaa

SEQ ID NO: 2858 - DNA, 1029 bp, Homo sapiens; identical to SEQ ID NO: 1601

SEQ ID NO: 2859 - DNA, 1112 bp, Homo sapiens
  misc_feature (40)..(40): n equals a,t,g, or c
  misc_feature (925)..(925): n equals a,t,g, or c
  misc_feature (1101)..(1101): n equals a,t,g, or c
aaatgagctgatttacaaaaatttaacgcgaattttaccnaaatattaacgcttccatttgccattcgccattcaggttggcaactgttgggaagggcgatcggtgcgggcctyttcgctattacgccagctggcgaaagggggatgtgctgcaaggcgattaagttgggtaacgccagggttttcccagtcacgacgttgtaaaacgacggccagtgaattgtaatacgactcactatagggcgaattgggtaccgggccccccctcgagtttttttttttttttttttaatctgcaaatgggctaggtaggttatttccacgtgagcaaatgcatttacaatcctggctttccttataggccgagtggtacattttgaagaatgagatgtaaactcccgaaggcattaagggcgtccaccagaaagagtggtctccttatctcagcatcacacatgtcaacaagatagaatctgagacagaaaaacttgttcctacccatgaaaaatagtctccccctcacatttcatgcttcccagcacttgtgggaagagcagtgcctttttgggaacaccagagaatgtggacatcacaactgctcttaaagcactgactgcaaaaatagaatgacctggggactcttgagaacagtagtgatggctgcccgctgtctgctcagctctaagttaattgacttgtgatgagaccctgcatccatgcttttaaaagctttgcggatcattctaacgtgtagccagggttgagactgaggatgaccaccttgagaagaaacctgcagcccgggggatccactagttctagagcggccgcaccgcggtggagctccagcttttgttccctttagtgagggttaatttcgagcttggcgtaatcatggtcatagctgtttcctgtgtgaaattgntatccgctcacaattccacacaacatacgagccggaagcataaagtgtaaagcctggggtgcctaatgagtgagctaactcacattaattgcgttgcgctactggccgctttccagtcgggaaacctgtcgtgccactgcattaatgaatcggccaacgccccggggaaaagcggnttgcgtattgg

SEQ ID NO: 2860 - DNA, 2460 bp, Homo sapiens
  misc_feature (14)..(14): n equals a,t,g, or c
  misc_feature (2458)..(2458): n equals a,t,g, or c
tgcccagtacatgnccttatggactttcctacttgscagtacatctasgtattagtcatcgctattaccatggtgatgcggttttgccagtacatcaatgggcgtggatagcggtttgactcacggggatttccaagtctccaccccattgacgtcaatgggagtttgttttggcaccaaaatcaacgggactttccaaaatgtcgtaacaactccgccccattgacgcaaatgggcggtaggcgtgtacggtgggaggtctatataagcagagctcgtttagtgaaccgtcagatcgcctggagacgccatccacgctgttttgacctccatagaagacaccgggaccgatccagcctccggactctagcctaggccgcgggacggataacaatttcacacaggaaacagctatgaccactaggcttttgcaaaaagctatttaggtgacactatagaaggtacgcctgcaggtaccggtccggaattcccgggtcgacccacgcgtccggaaggctgcaggaccaggaccgaaaaaggactaggaggctgggatcagcaacaactggggaaggccaaggaagactgacctgaggggaaaggagaaactggggaggtgaggtctactactcaacaggatattcttcaaggaaaatgaaccccacactaggcctggccatttttctggctgttctcctcacggtgaaaggtcttctaaagccgagcttctcaccaaggaattataaagctttgagcgaggtccaaggatggaagcaaaggatggcagccaaggagcttgcaaggcagaacatggacttaggctttaagctgctcaagaagctggccttttacaaccctggcaggaacatcttcctatcccccttgagcatctctacagctttctccatgctgtgcctgggtgcccaggacagcaccctggacgagatcaagcaggggttcaacttcagaaagatgccagaaaaagatcttcatgagggcttccattacatcatccacgagctgacccagaagacccaggacctcaaactgagcattgggaacacgctgttcattgaccagaggctgcagccacagcgtaagtttttggaagatgccaagaacttttacagtgccgaaaccatccttaccaactttcagaatttggaaatggctcagaagcagatcaatgactttatcagtcaaaaaacccatgggaaaattaacaacctgatcgagaatatagaccccggcactgtgatgcttcttgcaaattatattttctttcgagccaggtggaaacatgagtttgatccaaatgtaactaaagaggaagatttctttctggagaaaaacagttcagtcaaggtgcccatgatgttccgtagtggcatataccaagttggctatgacgataagctctcttgcaccatcctggaaataccctaccagaaaaatatcacagccatcttcatccttcctgatgagggcaagctgaagcacttggagaagggattgcaggtggacactttctccagatggaaaacattactgtcacgcagggtcgtagacgtgtctgtacccagactccacatgacgggcaccttcgacctgaagaagactctctcctacataggtgtctccaaaatctttgaggaacatggtgatctcaccaagatcgcccctcatcgcagcctgaaagtgggcgaggctgtgcacaaggctgagctgaagatggatgagaggggtacggaaggggccgctggcaccggagcacagactctgcccatggagacaccactcgtcgtcaagatagacaaaccctatctgctgctgatttacagcgagaaaataccttccgtgctcttcctgggaaagattgttaaccctattggaaaataaaggagaattcctgcttgccacagaccccgaaaaaaaaaaaaaaaaagggcggccgctctagaggatccctcgaggggcccaagcttacgcgtgcatgcgacgtcatagctctctccctatagtgagtcgtattataagctaggcactggccgtcgttttacaacgtcgtgactgggagatctgctagcttgggatctttgtgaaggaaccttacttctgtggtgtgacataattggacaaactacctacagagatttaaagctctaaggtaaatataaaatttttaagtgtataatgtgttaaactagctgcatatgcttgctgcttgagagttttgcttactgagtatgatttatgaaaatattatacacaggagctagtgattctaattgtttgtgtattttagattcacagtcccaaggctcatttcaggcccctcagtcctcacagtctgttcatgatcataatcagccataccacatttgtagaggttttacttgctttaaaaaaccttcacaccttccctgaacctgaaacataaaatgaatgcaattggtgntg

SEQ ID NO: 2861 - DNA, 776 bp, Homo sapiens
  misc_feature (767)..(767): n equals a,t,g, or c
gccatcacctgcccatacacgccagctcattgtattggccttactcttccaagaggccatggaagtataaataataaagcaagaaaggcagatgcatttggctggctcagtggacttctgaatgtactgtctactactcaacaggatattcttcaaggaaaatgaaccccacactaggcctggccatttttctggctgttctcctcacggtgaaaggtcttctaaagccgagcttctcaccaaggaattataaagctttgagcgaggtccaaggatggaagcaaaggatggcagccaaggagcttgcaaggcagaacatggacttaggctttaagctgctcaagaagctggccttttacaaccctggcaggaacatcttcctatcccccttgagcatctctacagctttctccatgctgtgcctgggtgcccaggacagcaccctggacgagatcaagcaggggttcaacttcagaaagatgccagaaaaagatcttcatgagggcttccattacatcatccacgagctgacccagaagacccaggacctcaaactgagcattgggaacacgctgttcattgaccagaggctgcagccacagcgtaagtttttggaagatgccaagaacttttacagtgccgaaaccatcttaccaactttcagaatttggaaatggctcaraagcagatcaatgactttatcagtcaaaaaacccatggggaaattaacaacctgatcgagaatataracccggcactgtgatgcntcttgcaaa

SEQ ID NO: 2862 - DNA, 1545 bp, Homo sapiens
cccacgcgtccggaaggctgcaggaccaggaccgaaaaaggactaggaggctgggatcagcaacaactggggaaggccaaggaagactgacctgaggggaaaggagaaactggggaggtgaggtctactactcaacaggatattcttcaaggaaaatgaaccccacactaggcctggccatttttctggctgttctcctcacggtgaaaggtcttctaaagccgagcttctcaccaaggaattataaagctttgagcgaggtccaaggatggaagcaaaggatggcagccaaggagcttgcaaggcagaacatggacttaggctttaagctgctcaagaagctggccttttacaaccctggcaggaacatcttcctatcccccttgagcatctctacagctttctccatgctgtgcctgggtgcccaggacagcaccctggacgagatcaagcaggggttcaacttcagaaagatgccagaaaaagatcttcatgagggcttccattacatcatccacgagctgacccagaagacccaggacctcaaactgagcattgggaacacgctgttcattgaccagaggctgcagccacagcgtaagtttttggaagatgccaagaacttttacagtgccgaaaccatccttaccaactttcagaatttggaaatggctcagaagcagatcaatgactttatcagtcaaaaaacccatgggaaaattaacaacctgatcgagaatatagaccccggcactgtgatgcttcttgcaaattatattttctttcgagccaggtggaaacatgagtttgatccaaatgtaactaaagaggaagatttctttctggagaaaaacagttcagtcaaggtgcccatgatgttccgtagtggcatataccaagttggctatgacgataagctctcttgcaccatcctggaaataccctaccagaaaaatatcacagccatcttcatccttcctgatgagggcaagctgaagcacttggagaagggattgcaggtggacactttctccagatggaaaacattactgtcacgcagggtcgtagacgtgtctgtacccagactccacatgacgggcaccttcgacctgaagaagactctctcctacataggtgtctccaaaatctttgaggaacatggtgatctcaccaagatcgcccctcatcgcagcctgaaagtgggcgaggctgtgcacaaggctgagctgaagatggatgagaggggtacggaaggggccgctggcaccggagcacagactctgcccatggagacaccactcgtcgtcaagatagacaaaccctatctgctgctgatttacagcgagaaaataccttccgtgctcttcctgggaaagattgttaaccctattggaaaataaaggagaattcctgcttgccacagaccccgaaaaaaaaaaaaaaaaaaaaaaaaaaaaaaaaaaaaaaaaaaaaaaaaaaaaaaaaaaaaaaaaaaaaaaaaaaaaaaaaaaaaaaaaaaaaaaaaaaaaaaaaaaaaaaaaaaaa

SEQ ID NO: 2863 - DNA, 1261 bp, Homo sapiens
gcgtccgccatcacctgcccatacacgccagctcattgtattggccttactcttccaagaggccatggaagtataaataataaagcaagaaaggcagatgcatttggctggctcagtggacttctgaatgtactgtctactactcaacaggatattcttcaaggaaaatgaaccccacactaggcctggccatttttctggctgttctcctcacggtgaaaggtcttctaaagccgagcttctcaccaaggaattataaagctttgagcgaggtccaaggatggaagcaaaggatggcagccaaggagcttgcaaggcagaacatggacttaggctttaagctgctcaagaagctggccttttacaaccctggcaggaacatcttcctatccccccttgagcatctctacagctttctccatgctgtgcctgggtgcccaggacagcaccctggacgagatcaagcaggggttcaacttcagaaagatgccagaaaaagatcttcatgagggcttccattacatcatccacgagctgacccagaagacccaggacctcaactgagcattgggaacacgctgttcattgaccagaggctgcagccacagcgtaagtttttggaagatgccaagaacttttacagtgccgaaaccatccttaccaactttcagaatttggaaatggctcagaagcagatcaatgactttatcagtcaaaaaacccatgggaaaattaacaacctgatcgagaatatagaccccggcactgtgatgcttcttgcaaattatattttctttcgagccaggtggaaacatgagtttgatccaaatgtaactaaagaggaagactctctcctacataggtgtctccaaaatctttgaggaacatggtgatctcaccaagatcgcccctcatcgcagcctgaaagtgggcgaggctgtgcacaaggctgagctgaagatggatgagaggggtacggaaggggccgctggcaccggagcacagactctgcccatggagacaccactcgtcgtcaagatagacaaaccctatctgctgctgatttacagcgagaaaataccttccgtgctcttcctgggaaagattgttaaccctattggaaaataaaggagaattcctgcttgccacagaccccgaaaaaaaaaaaaaaaaaaaaaaaaaaaaaaaaaaaaaaaaaaaaaaaaaaaaaaaaaaaaaaaaaaaaaaaaaaaaaaaaaaaaaaaaaaaaaaaaaaaaaaaa

SEQ ID NO: 2864 - DNA, 920 bp, Homo sapiens
tcgacccacgcgtccggagctcagacacaatctccaagaatgggaccctttcctctgtcacctccgcacgagccctccggccaccccatggccctcccaggcctggtgcattgacccccacgcccagtctctccagccaggccctgccctcaccaagactgcccacgacagatggggcccaccctcaaccaatatcccccatccctggtggggtttcttcctctggcttgagccgcatgggtgctgtgcctgtgatggtgcctgcccagagtcaagctggctctctggtatgatgaccccaccactcattggctaaaggatttggggtctctccttcctataagggtcacctctagcacagaggcctgagtcatgggaaagagtcacactcctgacccttagtactctgcccccacctctctttactgtgggaaaaccatctcagtaagacctaagtgtccaggagacagaaggagaagaggaagtggatctggaattgggaggagcctccacccacccctgactcctccttatgaagccagctgctgaaattagctactcaccaagagtgaggggcagagacttccagtcactgagtctcccaggcccccttgatctgtaccccacccctatctaacaccacccttggctcccactccagctccctgtattgatataacctgtcaggctggcttggttaggttttactggggcagaggatagggaatctcttattaaaactaacatgaaatatgtgttgttttcatttgcaaatttaaataaagatacataatgtttgtatgagaaaaaaaaaaaaaaaaaagggcggccgctctagaggatccctcgaggggcccaagcttacgcgtgcatgcgacgtcatagctctctccctatagtgagtcgtattataagctagg

SEQ ID NO: 2865 - DNA, 877 bp, Homo sapiens
ggcacgaggccgacgcctggggtgtggagctgccccaccgccaccccgtgggcgagtggatcaagaagaaaaaacctggcccgagagtcgaagggccgccccaggccaacagaaatcacccggccttacctctgtccccacccttaccttcccccacataccgccccctgcttgggttcccaccccagcgcttgccgctgctcccgctcctgtccccacagcctcctcctcccattctccatcaccagggaatgccccggttcccacagggtcccccagatgcctgttttccctcagaccatactttccagtcggatcaattctattgccattcagatgtcccctcatcagcccatgcaggtttcttcgtcgaagacaattttatggttggtcctcagctgcctatgcccttcttccccacaccccgttatcagcggcctgccccagtggtacataggggttttggcaggtatcgtccccgtggcccctatacgccctggggacagcggcctcgaccttcaaagagaagggccccagccaatcctgagccaaggcctcaatagacggacctaggccttatttcctctttatgaacatggattggacagatctgacacttcctttccattgcttggcctgaacagactgaccttgttaacttaagcctggagtccatgcctcgtcttccttttgttcattgctgttaccaagaaagccaaggaagagcagcctgactcattcttcttggctgcagcctcttccccacttcctgggagtgacccagcgttattcctgcctcctcactcctattctctttgcctttgtgtaaaaataaaatggaaataaacaagttgcacagaaaaaaaaaaaaaaaaaa

SEQ ID NO: 2866 - DNA, 1839 bp, Homo sapiens
ccacgcgtccgggagccgccctgggtgtcagcggctcggctcccgcgcacgctccggccgtcgcgcagcctcggcacctgcaggtccgtgcgtcccgcggctggcgcccctgactccgtcccggccagggagggccatgatttccctcccggggcccctggtgaccaacttgctgcggtttttgttcctggggctgagtgccctcgcgcccccctcgcgggcccagctgcaactgcacttgcccgccaaccggttgcaggcggtggagggaggggaagtggtgcttccagcgtggtacaccttgcacggggaggtgtcttcatcccagccatgggaggtgccctttgtgatgtggttcttcaaacagaaagaaaaggaggatcaggtgttgtcctacatcaatggggtcacaacaagcaaacctggagtatccttggtctactccatgccctcccggaacctgtccctgcggctggagggtctccaggagaaagactctggcccctacagctgctccgtgaatgtgcaagacaaacaaggcaaatctaggggccacagcatcaaaaccttagaactcaatgtactggttcctccagctcctccatcctgccgtctccagggtgtgccccatgtgggggcaaacgtgaccctgagctgccagtctccaaggagtaagcccgctgtccaataccagtgggatcggcagcttccatccttccagactttctttgcaccagcattagatgtcatccgtgggtctttaagcctcaccaacctttcgtcttccatggctggagtctatgtctgcaaggcccacaatgaggtgggcactgcccaatgtaatgtgacgctggaagtgagcacagggcctggagctgcagtggttgctggagctgttgtgggtaccctggttggactggggttgctggctgggctggtcctcttgtaccaccgccggggcaaggccctggaggagccagccaatgatatcaaggaggatgccattgctccccggaccctgccctggcccaagagctcagacacaatctccaagaatgggaccctttcctctgtcacctccgcacgagccctccggccaccccatggccctcccaggcctggtgcattgacccccacgcccagtctctccagccaggccctgccctcaccaagactgcccacgacagatggggcccaccctcaaccaatatcccccatccctggtggggtttcttcctctggcttgagccgcatgggtgctgtgcctgtgatggtgcctgcccagagtcaagctggctctctggtatgatgaccccaccactcattggctaaaggatttggggtctctccttcctataagggtcacctctagcacagaggcctgagtcatgggaaagagtcacactcctgacccttagtactctgcccccacctctctttactgtgggaaaaccatctcagtaagacctaagtgtccaggagacagaaggagaagaggaagtggatctggaattgggaggagcctccacccacccctgactcctccttatgaagccagctgctgaaattagctactcaccaagagtgaggggcagagacttccagtcactgagtctcccaggcccccttgatctgtaccccacccctatctaacaccacccttggctcccactccagctccctgtattgatataacctgtcaggctggcttggttaggttttactggggcagaggatagggaatctcttattaaaactaacatgaaatatgtgttgttttcatttgcaaatttaaataaagatacataatgtttgtatgagaaaaaaaaaaaaaaaaaa

SEQ ID NO: 2867 - DNA, 1839 bp, Homo sapiens
ccacgcgtccgggagccgccctgggtgtcagcggctcggctcccgcgcacgctccggccgtcgcgcagcctcggcacctgcaggtccgtgcgtcccgcggctggcgcccctgactccgtcccggccagggagggccatgatttccctcccggggcccctggtgaccaacttgctgcggtttttgttcctggggctgagtgccctcgcgcccccctcgcgggcccagctgcaactgcacttgcccgccaaccggttgcaggcggtggagggaggggaagtggtgcttccagcgtggtacaccttgcacggggaggtgtcttcatcccagccatgggaggtgccctttgtgatgtggttcttcaaacagaaagaaaaggaggatcaggtgttgtcctacatcaatggggtcacaacaagcaaacctggagtatccttggtctactccatgccctcccggaacctgtccctgcggctggagggtctccaagaaaaagactctggcccctacagctgctccgtgaatgtgcaaaacaaacaaggcaaatctaggggccacagcatcaaaaccttagaactcaatgtactggttcctccagctcctccatcctgccgtctccagggtgtgccccatgtgggggcaaacgtgaccctgagctgccagtctccaaggagtaagcccgctgtccaataccagtgggatcggcagcttccatccttccagactttctttgcaccagcattagatgtcatccgtgggtctttaagcctcaccaacctttcgtcttccatggctggagtctatgtctgcaaggcccacaatgaggtgggcactgcccaatgtaatgtgacgctggaagtgagcacagggcctggagctgcagtggttgctggagctgttgtgggtaccctggttggactggggttgctggctgggctggtcctcttgtaccaccgccggggcaaggccctggaggagccagccaatgatatcaaggaggatgccattgctccccggaccctgccctggcccaagagctcagacacaatctccaagaatgggaccctttcctctgtcacctccgcacgagccctccggccaccccatggccctcccaggcctggtgcattgacccccacgcccagtctctccagccaggccctgccctcaccaagactgcccacgacagatggggcccaccctcaaccaatatcccccatccctggtggggtttcttcctctggcttgagccgcatgggtgctgtgcctgtgatggtgcctgcccagagtcaagctggctctctggtatgatgaccccaccactcattggctaaaggatttggggtctctccttcctataagggtcacctctagcacagaggcctgagtcatgggaaagagtcacactcctgacccttagtactctgcccccacctctctttactgtgggaaaaccatctcagtaagacctaagtgtccaggagacagaaggagaagaggaagtggatctggaattgggaggagcctccacccacccctgactcctccttatgaagccagctgctgaaattagctactcaccaagagtgaggggcagagacttccagtcactgagtctcccaggcccccttgatctgtaccccacccctatctaacaccacccttggctcccactccagctccctgtattgatataacctgtcaggctggcttggttaggttttactggggcagaggatagggaatctcttattaaaactaacatgaaatatgtgttgttttcatttgcaaatttaaataaagatacataatgtttgtatgagaaaaaaaaaaaaaaaaaa

SEQ ID NO: 2868 - DNA, 1847 bp, Homo sapiens
tcgacccacgcgtccgggagccgccctgggtgtcagcggctcggctcccgcgcacgctccggccgtcgcgcagcctcggcacctgcaggtccgtgcgtcccgcggctggcgcccctgactccgtcccggccagggagggccatgatttccctcccggggcccctggtgaccaacttgctgcggtttttgttcctggggctgagtgccctcgcgcccccctcgcgggcccagctgcaactgcacttgcccgccaaccggttgcaggcggtggagggaggggaagtggtgcttccagcgtggtacaccttgcacggggaggtgtcttcatcccagccatgggaggtgccctttgtgatgtggttcttcaaacagaaagaaaaggaggatcaggtgttgtcctacatcaatggggtcacaacaagcaaacctggagtatccttggtctactccatgccctcccggaacctgtccctgcggctggagggtctccaagaaaaagactctggcccctacagctgctccgtgaatgtgcaaaacaaacaaggcaaatctaggggccacagcatcaaaaccttagaactcaatgtactggttcctccagctcctccatcctgccgtctccagggtgtgccccatgtgggggcaaacgtgaccctgagctgccagtctccaaggagtaagcccgctgtccaataccagtgggatcggcagcttccatccttccagactttctttgcaccagcattagatgtcatccgtgggtctttaagcctcaccaacctttcgtcttccatggctggagtctatgtctgcaaggcccacaatgaggtgggcactgcccaatgtaatgtgacgctggaagtgagcacagggcctggagctgcagtggttgctggagctgttgtgggtaccctggttggactggggttgctggctgggctggtcctcttgtaccaccgccggggcaaggccctggaggagccagccaatgatatcaaggaggatgccattgctccccggaccctgccctggcccaagagctcagacacaatctccaagaatgggaccctttcctctgtcacctccgcacgagccctccggccaccccatggccctcccaggcctggtgcattgacccccacgcccagtctctccagccaggccctgccctcaccaagactgcccacgacagatggggcccaccctcaaccaatatcccccatccctggtggggtttcttcctctggcttgagccgcatgggtgctgtgcctgtgatggtgcctgcccagagtcaagctggctctctggtatgatgaccccaccactcattggctaaaggatttggggtctctccttcctataagggtcacctctagcacagaggcctgagtcatgggaaagagtcacactcctgacccttagtactctgcccccacctctctttactgtgggaaaaccatctcagtaagacctaagtgtccaggagacagaaggagaagaggaagtggatctggaattgggaggagcctccacccacccctgactcctccttatgaagccagctgctgaaattagctactcaccaagagtgaggggcagagacttccagtcactgagtctcccaggcccccttgatctgtaccccacccctatctaacaccacccttggctcccactccagctccctgtattgatataacctgtcaggctggcttggttaggttttactggggcagaggatagggaatctcttattaaaactaacatgaaatatgtgttgttttcatttgcaaatttaaataaagatacataatgtttgtatgaaaaaaaaaaaaaaaaaaaaaaa

SEQ ID NO: 2869 - DNA, 1237 bp, Homo sapiens
cctgaagctgccctccccgcggcggggctcggtggcactgtgcattgccgcataccaggaggaccctgactacttgcgcaagtgcctgcgctcggcccagcgcatctccttccctgacctcaaggtggtcatggtggtggatggcaaccgccaggaggacgcctacatgctggacatcttccacgaggtgctgggcggcaccgagcaggccggcttctttgtgtggcgcagcaacttccatgaggcaggcgagggtgagacggaggccagcctgcaggagggcatggaccgtgtgcgggatgtggtgcgggccagcaccttctcgtgcatcatgcagaagtggggaggcaagcgcgaggtcatgtacacggscttcaaggccctcggcgattcggtggactacatccaggtgtgcgactctgacactgtgctggatccagcctgcaccatcgagatgcttcgagtcctggaggaggatccccaagtagggggagtcgggggagatgtccagatcctcaacaagtacgactcatggatttccttcctgagcagcgtgcggtactggatggccttcaacgtggagcgggcctgccagtcctactttggctgtgtgcagtgtattagtgggcccttgggcatgtaccgcaacagcctcctccagcagttcctggaggactggtaccatcagaagttcctaggcagcaagtgcagcttcggggatgaccggcacctcaccaaccgagtcctgagccttggctaccgaactaagtataccgcgcgctccaagtgcctcacagagacccccactaagtacctccggtggctcaaccagcaaacccgctggagcaagtcttacttccgggagtggctctacaactctctgtggttccataagcaccacctctggatgacctacgagtcagtggtcacgggtttcttccccttcttcctcattgccacggttatacagcttttctaccggggccgcatctggaacattctcctcttcctgctgacggtgcagctggtgggcattatcaaggccacctacgcctgcttccttcggggcaatgcagagatgatcttcatgtccctctactccctcctctatatgtccagccttctgccggccaagatctttgccattgctaccatcaacaaatctggctggggcacctctggccgaaaaacaaaaaaaaaaaaaaaaaaaaaaaaaaaaaaaaaaaagggcggccgc

SEQ ID NO: 2870 - DNA, 391 bp, Homo sapiens
gcgagtgcgttcgcggctgctttgacctggtgggcgccgcctccggcactgcaccgaggcggggcgccagcgcccaggttgctgggctggccttggcgcccccttcccctacccagagcgcaggcaggcaggggggtcccgccgcgccccttcagcatatgccggtgcagctgacgacagccctgcgtgtggtgggcaccagcctgtttgccctggcagtgctgggtggcatcctggcagcctatgtgacgggctaccagttcatccacacggaaaagcactacctgtccttcggcctgtacggcgccatcctgggcctgcacctgctattyagagctttttgcttctgarcacggcgcatgcaacgtgccggccaggccctgaagctgcc

SEQ ID NO: 2871 - DNA, 1617 bp, Homo sapiens
gcgtccgcgagtgcgttcgcggctgctttgacctggtgggcgccgcctccggcactgcaccgaggcggggcgccacgcccaggttgctgggctggccttggcgcccccttcccctacccagagcgcaggcaggcaggggggtcccgccgcgccccttcagcatatgccggtgcagctgacgacagccctgcgtgtggtgggcaccagcctgtttgccctggcagtgctgggtggcatcctggcagcctatgtgacgggctaccagttcatccacacggaaaagcactacctgtccttcggcctgtacggcgccatcctgggcctgcacctgctcattcagagcctttttgccttcctggagcaccggcgcatgcaacgtgccggccaggccctgaagctgccctccccgcggcggggctcggtggcactgtgcattgccgcataccaggaggaccctgactacttgcgcaagtgcctgcgctcggcccagcgcatctccttccctgacctcaaggtggtcatggtggtggatggcaaccgccaggaggacgcctacatgctggacatcttccacgaggtgctgggcggcaccgagcaggccggcttctttgtgtggcgcagcaacttccatgaggcaggcgagggtgagacggaggccagcctgcaggagggcatggaccgtgtgcgggatgtggtgcgggccagcaccttctcgtgcatcatgcagaagtggggaggcaagcgcgaggtcatgtacacggccttcaaggccctcggcgattcggtggactacatccaggtgtgcgactctgacactgtgctggatccagcctgcaccatcgagatgcttcgagtcctggaggaggatccccaagtagggggagtcgggggagatgtccagatcctcaacaagtacgactcatggatttccttcctgagcagcgtgcggtactggatggccttcaacgtggagcgggcctgccagtcctactttggctgtgtgcagtgtattagtgggcccttgggcatgtaccgcaacagcctcctccagcagttcctggaggactggtaccatcagaagttcctaggcagcaagtgcagcttcggggatgaccggcacctcaccaaccgagtcctgagccttggctaccgaactaagtataccgcgcgctccaagtgcctcacagagacccccactaagtacctccggtggctcaaccagcaaacccgctggagcaagtcttacttccgggagtggctctacaactctctgtggttccataagcaccacctctggatgacctacgagtcagtggtcacgggtttcttccccttcttcctcattgccacggttatacagcttttctaccggggccgcatctggaacattctcctcttcctgctgacggtgcagctggtgggcattatcaaggccacctacgcctgcttccttcggggcaatgcagagatgatcttcatgtccctctactccctcctctatatgtccagccttctgccggccaagatctttgccattgctaccatcaacaaatctggctggggcacctctggccgaaaaacaaaaaaaaaaaaaaaaaaaaaaaaaaaaaaaaaaaa

SEQ ID NO: 2872 - DNA, 1018 bp, Homo sapiens
gctcggagcaggcggagtaaagggacttgagcgagccagttgccggattattctatttcccctccctctctcccgccccgtatctcttttcacccttctcccaccctcgctcgcgtagccatggcggagccgtcggcggccactcagtcccattccatctcctcgtcgtccttcggagccgagccgtccgcgcccggcggcggcgggagcccaggagcctgccccgccctggggacgaagagctgcagctcctcctgtgcggtgcacgatctgattttctggagagatgtgaagaagactgggtttgtctttggcaccacgctgatcatgctgctttccctggcagctttcagtgtcatcagtgtggtttcttacctcatcctggctcttctctctgtcaccatcagcttcaggatctacaagtccgtcatccaagctgtacagaagtcagaagaaggccatccattcaaagcctacctggacgtagacattactctgtcctcagaagctttccataattacatgaatgctgccatggtgcacatcaacagggccctgaaactcattattcgtctctttctggtagaagatctggttgactccttgaagctggctgtcttcatgtggctgatgacctatgttggtgctgtttttaacggaatcacccttctaattcttgctgaactgctcattttcagtgtcccgattgtctatgagaagtacaagacccagattgatcactatgttggcatcgcccgagatcagaccaagtcaattgttgaaaagatccaagcaaaactccctggaatcgccaaaaaaaaggcagaataagtacatggaaaccagaaatgcaacagttactaaaacaccatttaatagttataacgtcgttacttgtactatgaaggaaaatactcagtgtcagcttgagcctgcattccaagctttttttttaatttggtggtttctcccatcctttccctttaaccctcagtatcaagcacaaaaattgatggac

SEQ ID NO: 2873 - DNA, 976 bp, Homo sapiens
  misc_feature (4)..(4): n equals a,t,g, or c
  misc_feature (9)..(9): n equals a,t,g, or c
  misc_feature (851)..(851): n equals a,t,g, or c
  misc_feature (873)..(873): n equals a,t,g, or c
  misc_feature (901)..(901): n equals a,t,g, or c
  misc_feature (906)..(906): n equals a,t,g, or c
  misc_feature (927)..(927): n equals a,t,g, or c
  misc_feature (943)..(943): n equals a,t,g, or c
  misc_feature (946)..(946): n equals a,t,g, or c
cttntttantgaaccttcagatcgcttggagacgccatccacgttgttttgmcctccatagaagacaccgggaccgatccagcctccggacttctagcytaggccgcgggacggataacaatttcacacaggaaacagctatgaccactaggcttttgcaaaaagctatttaggtgacactatagaaggtacgcctgcaggtaccggtccggaattcccgggtcgacccacgcgtccggatctccaaggatttggtggcatacccactccagcacacagaagcatgaggttcatgactctcctcttcctgacagctctggcaggagccctggtctgtgcctatgatccagaggccgcctctgccccaggatcggggaacccttgccatgaagcatcagcagctcaaaaggaaaatgcaggtgaagacccagggttagccagacaggcaccaaagccaaggaagcagagatccagccttctggaaaaaggcctagacggagcaaaaaaagctgtggggggactcggaaaactaggaaaagatgcagtcgaagatctagaaagcgtgggtaaaggagccgtccatgacgttaaagacgtccttgactcagtactatagctgtaaggagaagctgagaaatgatacccaggagcagcaggctttacgtcttcagcctaaaacctaaaaaaaaaaaaaaaagggcggccgctctagaggatccctcgaggggcccaagcttacgcgtgcatgcgacgtcatagctctctccctatagtgagtcgtattataagctaggcactgccgtcgttttacaacgtcgtgactgggagatctgctacttgggatcttttgngaaggaaccttacttctggggngggacataattggaccaaactacctacngaganttaaagcttttaaggtaaatnttaaaattttttaagnggnataaagggggttaaacttagcttgcataat

SEQ ID NO: 2874 - DNA, 555 bp, Homo sapiens
  misc_feature (543)..(543): n equals a,t,g, or c
  misc_feature (545)..(545): n equals a,t,g, or c
  misc_feature (549)..(549): n equals a,t,g, or c
gcggacgcgtgggcggacgcgtgggcaaaatctccaaggatttggtggcatacccactccagcacacagaagcatgaggttcatgactctcctcttcctgacagctctggcaggagccctggtctgtgcctatgatccagaggccgcctctgccccaggatcggggaacccttgccatgaagcatcagcagctcaaaaggaaaatgcaggtgaagacccagggttagccagacaggcaccaaagccaaggaagcagagatccagccttctggaaaaaggcctagacggagcaaaaaaagctgtggggggactcggaaaactaggaaaagatgcagtcgaagatctagaaagcgtgggtaaaggagccgtccatgacgttaaagacgtccttgactcagtactatagctgtaaggagaagctgagaaatgatacccaggagcagcaggctttacgtcttcagcctaaaacctaaaaaaaaaaaaaaaaaaaaaaattttaaaacagctattaaactgaaagcwtctgttaaaaaaaaaaaaaananaaanaagaat

SEQ ID NO: 2875 - DNA, 478 bp, Homo sapiens
  misc_feature (468)..(468): n equals a,t,g, or c
  misc_feature (470)..(470): n equals a,t,g, or c
gcccacgcgtccgccaaacttgacgccatgaagatcccggtccttcctgccgtggtgctcctctccctcctggtgctccactctgcccagggagccaccctgggtggtcctgaggaagaaagcaccattgagaattatgcgtcacgacccgaggcctttaacaccccgttcctgaacatcgacaaattgcgatctgcgtttaaggctgatgagttcctgaactggcacgccctctttgagtctatcaaaaggaaacttcctttcctcaactgggatgcctttcctaagctgaaaggactgaggagcgcaactcctgatgcccagtgaccatgacctccactggaagagggggctagcrtgagcgctgattctcaacctaccataactctttcctgcctcaggaactccaataaaacattttccatccaamaaaaaaaaaaaaaaggggsgsccttttaagagaatccntnggggggcc

SEQ ID NO: 2876 - DNA, 399 bp, Homo sapiens
cgggtcgacccacgcgtccgatgaagatcccggtccttcctgccgtggtgctcctctccctcctggtgctccactctgcccagggagccaccctgggtggtcctgaggaagaaagcaccattgagaattatgcgtcacgacccgaggcgtttaaggctgatgagttcctgaactggcacgccctctttgagtctatcaaaaggaaacttcctttcctcaactgggatgcctttcctaagctgaaaggactgaggagcgcaactcctgatgcccagtgaccatgacctccactggaagagggggctagcrtgagcgctgattctcaacctaccataactctttcctgcctcaggaactccaataaaacattttccatccaaaaaaaaaaaaaaagcggcc

SEQ ID NO: 2877 - DNA, 1540 bp, Homo sapiens
  misc_feature (3)..(3): n equals a,t,g, or c
  misc_feature (63)..(63): n equals a,t,g, or c
  misc_feature (70)..(70): n equals a,t,g, or c
cantccataaacctaggtttattcgaaaccactcccaagtggtatataaaccaccaggatttncaggccncaagagttaaagtattatttaaatgggttgctcaactggaacacggaggcacaggcattttatatattcataggaagcactaaagtcttgtggaatgagaatgaacacataaacctgtttctagcgattaaaagatttctactaaataggaagcaaatagtttactgaagtaaatttcaccagtcattaggcttcattaataatatttattttaaagatcaacttttattgtaacaaatataaagtcatcaatgttttacaaattgtcaaaaatgctttaagtacaaaaaaatacattagtaaaatgaaagttatgttgtattatttggtatacacttaatactgccaacatgcataacatatgccagaaaagctcatgcattattggaagagaaaagaaatgtgatgtaactgctatattgtctgattataaattcattgcttcagtcagttttctttcttcagggataccatttacctgtagtctgctgttggggaatctgagtctgatgtggcaagttctgctgcgtttgcatcaatggcatgtttgtgctatcatagttgtctgtgtgtaaaggaggtatgatttccccagtcacagggtggaacacaggaagcgttgacaggggccatgctatctctctattcttggacatgtctcgaagctccttggtagatttctgaatagcactgtgatggaccagttggatgtctggtgtttgcatgtttctcttttccacgccttcccgtcggcagcacatgatataagcaagtattagaaaaaggaccagtgccactgccgagggcacagccagtgtaattaggaaatccgtgtaatagtctctgcttttcaaagaatcagaagggggtttgtattctccaccatcaggtaaaatcccctctccacgaatcacttcctgataggtggacacttgctttgttttatcaaccaatgaaattttgcaccagtcaatgtaaaattgagtacgaaattttttatcacatgttattacaggctccatttcttgactacatctcaattgattctgtggattttcaacttctcgtaaacaagaagaaaacgggacatctgcaccaaccatgacataaacgccctccttcaggtcattaatgggaagtggcaccctgccacccctgtctagggccgatgtgatgtttatggcgttcaggcgctctggctgccacacatttttcactgcgccaagaaagtctccaagaacctcactggccaacatttcttctacattcatattcttaatgaagaattctgcttgatatggcaacgggaagtcttctgcagacattatattaattatcaaattatgccttgcagtctcaaaggtgcgcctgttgtaggcagttatctattataaaaggaaaaccatattaaagaagtgaaatgttctttgtaaaatgaaattcattaaggattaaaatgaaaacaaattg

SEQ ID NO: 2878 - DNA, 1446 bp, Homo sapiens
  misc_feature (1318)..(1318): n equals a,t,g, or c
  misc_feature (1419)..(1419): n equals a,t,g, or c
gcgaggacggacggtttagccaggccaataatgcaattgccccggtggtgggagctgggagacccctgtgcttggacgggacagggtcgggggacacgcaggatgagccccgcgaccactggcacattcttgctgacagcttttttattaagctgtgctgatggcataaatggaacagttaactggaagaccagacaggccaacaattttattatcagcagaaaaatggctgctgggatgaaagatgtgtacagtattttctccaaggtacactccgatcggaatgtatacccatcagcaggtgtcctctttgttcatgttttggaaagagaatattttaagggggaatttccaccttacccaaaacctggcgagattagtaatgatcccataacatttaatacaaatttaatgggttacccagaccgacctggatggcttcgatatatccaaaggacaccatatagtgatggagtcctatatgggtccccaacagctgaaaatgtggggaagccaacaatcattgagataactgcctacaacaggcgcacctttgagactgcaaggcataatttgataattaatataatgtctgcagaagacttcccgttgccatatcaagcagaattcttcattaagaatatgaatgtagaagaaatgttggccagtgaggttcttggagactttcttggcgcagtgaaaaatgtgtggcagccagagcgcctgaacgccataaacatcacatcggccctagacaggggtggcagggtgccacttcccattaatgacctgaaggagggcgtttatgtcatggttggtgcagatgtcccgttttcttcttgkttacgagaagttgaaaatccacagaatcaattgagatgtagtcaagaaatggagcctgtaataacatgtgataaaaaatttcgtactcaattttacattgactggtgcaaaatttcattggttgataaaacaaagcaagtgtccacctatcaggaagtgattcgtggagaggggattttacctgatggtggagaatacaaacccccttctgattctttgaaaagcagagactattacacggatttcctaattacactggctgtgccctcggcagtggcactggtcctttttctaatacttgcttatatcatgtgctgccgacgggaaggcgtcatccaactggtccatcacagtgctattcagaaatctaccaaggagcttcgagacatgtccaagaatagagagatagcatggcccctgtcaacgcttcctgtgttccaccctgtgactggggaaatcatacctcctttacacncagacactatgatagcacaaacatgccattgatgcaaacgcagcatacttgccacatcagactcagattccccaaccagcagaactacaggaaaattttcngttttgaacaactttttccaaaaaatt

SEQ ID NO: 2879 - DNA, 864 bp, Homo sapiens
ttttttttttttttttttttttttttttttttttgatcccggaacatttatttccagaggcttttgatagaagagcacaatcttgaataaaattacaccactgtacttaagggcaacactacatagtaagcaaaatctgctctgaaccctttcacagaagagacacttcagaaaggaattttacatctcctgacagttttacaacattcatacctctgatgcacttcaagccccaacccatctctcattttctaacttctttaacagaaatgtgtgttcacaagttgtgtgtgcatgcacatgtgcctctgtgtgtacacaaaaggctaattttacctacttgataaatgagctgagacgatgttttgggaaaaaaaaaattggaaaaaaaatgttaccccaacacgatggagaagccaatccaaaaaagcttcatgctagagctagctttctcctcagaaacttacatcctaaaaacatccctatgggtgcctaaaaatggaaatccagtgagttcatggccttgagttcactcctgtcctgaatttctcccagtgcaggtccagaagggcgagatgtggcagaaaggagaatgtgggaatgtgtgagtatcccacagccagctcacagtgcagcttgcactcagaaaggagactcagggacacaaggtctcaggatgcacagttcaccttggcctcatgtacctgggctggggagagggagaccattcaaaagcctgtgcttggccgggtgtggtggctcacgcctatcatcccagcactttgggaggctgaggcgggcagatcacttgaggtcaggaggttgagaccagcctgaccaacatggtgaaaccggacgcgtggg

SEQ ID NO: 2880 - DNA, 580 bp, Homo sapiens
ccacgcgtccgaataactagagaggaacaatggggttattcagaggttttgttttcctcttagttctgtgcctgctgcaccagtcaaatacttccttcattaagctgaataataatggctttgaagatattgtcattgttatagatcctagtgtgccagaagatgaaaaaataattgaacaaatagaggatatggtgactacagcttctacgtacctgtttgaagccacagaaaaaagattttttttcaaaaatgtatctatattaattcctgagaattggaaggaaaatcctcagtacaaaaggccaaaacatgaaaaccataaacatgctgatgttatagttgcaccacctacactcccaggtagagatgaaccatacaccaagcagttcacagaatgtggagagaaaggcgaatacattcacttcacccctgaccttctacttggaaaaaaacaaaatgaatatggaccaccaggcaaactgtttgtccatgagtgggctcacctccggtggggagtgtttgatgagtacaatgaagatcagcctttctaccgtgctaagtcaaaaaaaaaaaaaaa

SEQ ID NO: 2881 - DNA, 940 bp, Homo sapiens; identical to SEQ ID NO: 1438

SEQ ID NO: 2882 - DNA, 1258 bp, Homo sapiens
gaaattaaccctcactaaagggaacaaaagctggagctccaccgcggtggcggccgctctagaactagtggatcccccgggctgcaggaattcggcacgagagcagaagccagcgcctcggagccacaactggcagacagcctgtggcgcggcaaccaaccgactgggtctccagtagtctctgaggagccgctcgaccttctcccgaccctggatctgaggcaggagatgcctcccccgcgggtgttcaagagctttctgagcctgctcttccaggggctgagcgtgttgttatccctggcaggagacgtgctggtcagcatgtacagggaggtctgttccatccgcttcctgttcacggctgtgtcgctgctgagcctctttctgtcagcattctggctggggcttctgtacctggtctctcctttggagaatgaacctaaggagatgctgactctaagtgagtaccacgagcgcgtgcgctcccaggggcagcagctgcagcagctccaggccgagctggataaactccacaaggaggtgtccactgttcgggcagccaacagcgagagagtggccaagctcgtgttccagaggctgaatgaggattttgtgcggaagcccgactatgctttgagctctgtgggagcctccatcgacctgcagaagacatcccacgattacgcagacaggaacactgcctacttctggaatcgcttcagcttctggaactacgcacggccgcccacggttatcctggagccccacgtgttccctgggaattgctgggcttttgaaggcgaccaaggccaggtggtgatccaactgccgggccgagtgcagctgagcgacatcactctgcagcatccaccgcccagcgtggagcacaccggaggagccaacagcgccccccgcgatttcgcggtctttggcctccaggtttatgatgaaactgaagtttccttggggaaattcaccttcgatgttgagaaatcggagattcagactttccacctgcagaatgaccccccagctgcctttcccaaggtgaagatccagattctaagcaactggggccacccccgtttcacgtgcttgtatcgagtccgtgcccacggtgtgcgaacctcagagggggcagagggcagtgcacaggggccccattaaacatgctgatttttggagtaraaaaaaaaaaaaaaaactcgagggggggcccggtacccaattcgccctatagtgagtcrtattacaatag

SEQ ID NO: 2883 - DNA, 597 bp, Homo sapiens
  misc_feature (510)..(510): n equals a,t,g, or c
  misc_feature (566)..(566): n equals a,t,g, or c
  misc_feature (570)..(570): n equals a,t,g, or c
  misc_feature (588)..(588): n equals a,t,g, or c
  misc_feature (594)..(594): n equals a,t,g, or c
cgggtcgacccacgcgtccgcccacgcgtccgcccacgcgtccgcccacgcgtccgggtctgtggtccgcaaggccccagtggagcccttgggttcccgcagaaccgactgggtctccagtagtctctgaggagccgctcgaccttctcccgaccctggatctgaggcaggagatgcctcccccgcgggtgttcaagagctttctgagcctgctcttccaggggctgagcgtgttgktatccytggcaggagacgtgctggtcagcatgtacagggaggtctgttccatccgcttcctgttcacggctgtgtcgctgctgagcctctttctgtcagcattctggctggggcttctgtacctggtctctcctttggagaatgaacctaaggagatgctgactctaagtgagtaccacgagcgcgtgcgctcccaggggcagcagctgcagcagctccaggccgagctggataaactccacaaggaggtgtccactgttcggcagcaacagngagagagtgccaagcttcgtgtccaaaagctgaatgaggatttttgtgcggaagcncgantatgctttgactctgggnagcctncat

SEQ ID NO: 2884 - DNA, 1066 bp, Homo sapiens
  misc_feature (1063)..(1064): n equals a,t,g, or c
cggcacgaggaacttttttttttttttttttgcgctttcatgaaaatatttattacccaataaaaatattcacccagtgcttcagcttacggtaaactaaacacatctattatttacaacatagaaaattaaaggcgatgcccaagtcccggccttccgcaggggcgccgctcccgctggaggacggaagggaccagggaccgagggtgcgcgggcgcatccgggcgcaggaggcggtgcaggagtgcgcagggcagcaagagtagcaggctgggcgcgcccccggcgctcggcccgtgagcgtgggaggccaggaagtctttcgggtcacagcggtcaggcgtctggagggggaggcagtgcagggccccgaagatgcacctgcagaggtggcaggcgcggagggtccaggctccgtgctccagggcgccgcattcactgcgcctctggtcatgctcgcagtagcggccggtgaagtgggccgggcacacgcagaagctgcccagcacgcaggtaccgccgttcctgcagcagcgcggccgcgcggacgcaccctctccgaaagcccgggagtaggggagcggctcctccggcccccagccctcggcgctcccagtcacctctccgaaatgactggaggtccagttragcggtgactgtcggtgcttctgagtggcaaccttggtgacttccyctctaccgccgttatgtttctctctttgatagctgtttcccaaattgatgatctgtaatgccaaactgaccgtaaacagaagcctgacatggtgcctccaggtcatttttggtttgagagtctccttctcttagtgcattgaagatcagtttccaggaaagctgaatctgaagagtctctgcatttgaaggtgtctttactccaggccccggggacacagaatggacgagtacagaagatgtggatgttccctcgtgccgaattcctgcagcccgggggatccactagttctagagcggccgccaccgcggtggagctccagcttttgttccctttagtgagggttaattgcgcgctggcgtattcatnncc

SEQ ID NO: 2885 - DNA, 387 bp, Homo sapiens
ccacgcgtccgccctgcatggcgagatgtcctcctttcccgggccacagtgtgtgcaactaataaacctcctccatctcatctgcccagtgtcgggtcttgtgtgttcagccatcaccatagccctcaggcagaagtccatccctcaccaacagggaagagaggcagtgatcaaaacacctcctccaggaagtcttccctgaagttcgtagtctggcttcagtgccacttcttccctgccctcatattcgctaaccgccacttactgcctggttttcagcctcactaggatgtgggccactaagggccaacatggtcctacttgcagctgcattatcagggcctaccataacaccttccaaatgcttaaaaaaaaaaaaaaaaaaaa

SEQ ID NO: 2886 - DNA, 1721 bp, Homo sapiens
attggcattctttgttactattggctcaacaccgtggccctgtctggtgaagagtgttgggaaaccctcattggccaggacatctaccggctccttctgatggattttgtgttctctttagtcaattccttcctgggggagtttctgaggagaatcattggsatgcaactgatcacaagtcttggccttcaggagtttgacattgccaggaacgttctagaactgatctatgcacaaactctggtgtggattggcatcttcttctgccccctgctgccctttatccaaatgattatgcttttcatcatgttctactccaaaaatatcagcctgatgatgaatttccagcctccgagcaaagcctggcgggcctcacagatgatgactttcttcatcttcttgctctttttcccatcyttcaccggggtcttgtgcaccctggccatcaccatctggagattgaagccttcagctgactgtggcccttttcgaggtctgcctctcttcattcactccatctacagctggatcgacaccctaagtacacggcctggctacctgtgggttgtttggatctatcggaacctcattggaagtgtgcacttctttttcatcctcaccctcattgtgctaatcatcacctatctttactggcagatcacagagggaaggaagattatgataaggctgctccatgagcagatcattaatgagggcaaagataaaatgttcctgatagaaaaattgatcaagctgcaggatatggagaagaaagcaaaccccagctcacttgttctggaaaggagagaggtggagcaacaaggctttttgcatttgggggaacatgatggcagtcttgacttgcgatctagaagatcagttcaagaaggtaatccaagggcctgatgactcttttggtaacsagacaccaatcaaataaggggaggagatgaaaatggaatgatttcttccatgccacctgtgcctttaggaactgcccagaagaaaatccaaggctttagccaggagcggaaactgactaccatgtaattatcaaagtaaaattgggcattccatgctatttttaatacctggattgctgatttttcaagacaaaatacttggggttttccaataaagattgttgtaatattgaaatgagcctacaaaaacctaggaagagataactagggaataatgtatattatcttcaagaartgtgtgcaggaatgattggttcttagaaatctctcctgccagacttcccagacctggcaaaggtttagaaactgttgctaagaaaagtggtccatcctgaataaacatgtaatactccagcagggatatgaagcctctgaattgtagaacctgcatttatttgtgactttgaactaaagacatcccccatgtcccaaaggtggaatacaaccagaggtctcatctctgaactttcttgcgtactgattacatgagtctttggagtcggggatggaggaggttctgcccctgtgaggtgttatacatgaccatcaaagtcctacgtcaagctagctttgcacagtggcagtaccgtagccaatgagatttatccgagacgcgattattgctaattggaaattttcccaataccccaccgtgatgacttgaaatataatcagcgctggcaatttttgacagtctctacggagactgaataagaaaaaaaaaaaaaaaaaactcga

SEQ ID NO: 2887 - DNA, 1008 bp, Homo sapiens
ccacgcgtccgagtcggtggaggtcggtccggctgcggagccggcgtgcgcaaaggccgctgggagccttcggagcccggggcagtgcgatggcgccggcggaggctcgcggcgcgctcccgggctggatctccgtgctgggctggggtctggcgctgtgctctctgtgcggggcgggcccactgtggagtggcagccatgagtggaaaaaactaattttgacccagcactggcccccaacagtatgcaaggaggttaacagctgccaagactctctggattactggacaatacatggactatggcccgatagagcagaagattgtaaccagtcctggcactttaacttagatgagattaaggaccttttgcgagacatgaagatctactggcccgatgtgattcaccggtcttctaatcgcagccaattctggaaacatgagtgggttaaacacggcacctgtgctgcccaggtagacgccctcaattccgagaagaagtactttgggaagagcctggatctgtacaagcagattgacctcaacagtgtgctacaaaaatttgggatcaagccatccatcaactactaccagcttgcagatttcaaagatgcacttaccagaatctatggtgtggtgcctaaaatccagtgccttatgccagaacagggagagagcgtgcagaccgttggccagatagagctgtgcttcaccaaggaggacttacatttgcggaactgcactgagccaggagagcagctgtcctccaggcaggaagcctggctggccatggaggcttctacacatgggatgatggtctgtgaagacggtccaatcttctaccctccacctacaaagacccaacattgatgttcacattttggaaatattttgtgtcccacaaagtaagaaaagttcacaaatcattgctttctaaaattttactaaaaagtttcttaaaatgtgaaaaaaaaaaaaaaaaaaaaaaaaaaaaaaaaaaaaaaaaaaa

SEQ ID NO: 2888 - DNA, 729 bp, Homo sapiens
ggcaccaactcagagtcttgttggagctttatccctttgtcctagccaaccatggccagcccgctgcgctccttgctgttcctgctggccgtcctggccgtggcctgggcggcgaccccaaaacaaggcccgcgaatgttgggagccccggaggaggcagatgccaatgaggaaggcgtgcggcgagcgttggacttcgctgtgagcgagtacaacaagggcagcaacgatgcgtaccacagccgcgccatacaggtggtgagagctcgtaagcagctcgtggctggagtgaactattttttggatgtggagatgggccgaactacatgtaccaagtcccagacaaatttgactgactgtcctttccatgaccagccccatctgatgaggaaggcactctgctccttccagatctacagcgtgccctggaaaggcacacactccctgacaaaattcagctgcaaaaatgcctaagggctgagtctagaaggatcacgcagactgttccttacttgtgctccttccctatagtgtttcatctcgcagaagggtgctccggctttggagggcaccgccagtgtgtttgtaccaggagacagtaaaggagctgctgcaggcaggttctgcacatctgaacagctgtcccctggctccactcttcttgcagtacctgtcatgccttgctcaattaaaaaagcactccttaaaaaaaaaaaaaaaaaraaaaag

SEQ ID NO: 2889 - DNA, 738 bp, Homo sapiens
ccacgcgtccgcaactcagagtcttgttggagctttatccctttgtcctagccaaccatggccagcccgctgcgctccttgctgttcctgctggccgtcctggccgtggcctgggcggcgaccccaaaacaaggcccgcgaatgttgggagccccggaggaggcagatgccaatgaggaaggcgtgcggcgagcgttggacttcgctgtgagcgagtacaacaagggcatcaacgatgcgtaccacagccgcgccatacaggtggtgagagctcgtaagcagctcgtggctggagtgaactattttttggatgtggagatgggccgaactacatgtaccaagtcccagacaaatttgactgactgtcctttccatgaccagccccatctgatgaggaaggcactctgctccttccagatctacagcgtgccctggaaaggcacacactccctgacaaaattcagctgcaaaaatgcctaagggctgagtctagaaggatcacgcagactgttccttacttgtgctccttccctatagtgtttcatctcgcagaagggtgctccggctttggagggcaccgccagtgtgtttgtaccaggagacagtaaaggagctgctgcaggcaggttctgcacatctgaacagctgtcccctggctccactcttcttgcagtacctgtcatgccttgctcaattaaaaaagcactccttaaaaaaaaaaaaaaaaaaaaaaaaaaa

SEQ ID NO: 2890 - DNA, 1111 bp, Homo sapiens
gacttgtttcggaaggagctgactggccaatcacaattgcgaagatgaaggctctgtgggccgtgctgttggtcacattgctgacaggatgcctagccgagggagagccggaggtgacagatcagctcgagtggcaaagcaaccaaccctgggagcaggccctgaaccgcttctgggattacctgcgctgggtgcagacgctgtctgaccaggtccaggaagagctgcagagctcccaagtcacacaagaactgacggcactgatggaggacactatgacggaagtaaaggcttacaaaaaggagctggaggaacagctgggtccagtggcggaggagacacgggccaggctgggcaaagaggtgcaggcggcacaggcccgactcggagccgacatggaggatctacgcaaccgactcgggcagtaccgcaacgaggtgcacaccatgctgggccagagcacagaggagatacgggcgcggctctccacacacctgcgcaagatgcgcaagcgcttgatgcgggatgccgatgatctgcagaagcgcctagctgtgtacaaggcaggggcacgcgagggcgccgagcgcggtgtgagtgccatccgtgagcgcctggggcctctggtggagcaaggtcgccagcgcactgccaacctaggcgctggggccgcccagcctctgcgcgatcgcgcccaggcttttggtgaccgcatccgagggcggctggaggaagtgggcaaccaggcccgtgaccgcctagaggaggtgcgtgagcacatggaggaggtgcgctccaagatggaggaacagacccagcaaatacgcctgcaggcggagatcttccaggcccgcctcaagggctggttcgagccaatagtggaagacatgcatcgccagtgggcaaacctgatggagaagatacaggcctctgtggctaccaaccccatcatcaccccagtggcccaggagaatcaatgagtatccttctcctgtcctgcaacaacatccatatccagccaggtggccctgtctcaagcacctctctggccctctggtggcccttgcttaataaagattctccgagcaaaaaaaaaaaaaaaaaaaaaaag

SEQ ID NO: 2891 - DNA, 1211 bp, Homo sapiens
gggaatcttcctcctaawgggaacaaaagctggagctccaccgcggtggcggccgctctagaactagtggatcccccgggctgcaggaattcggcacgaggagcttctttgctccggacgcccctggacgtggcgggcagccgcgagggtaaccaccatgatcccctgggtgctcctggcctgtgccctcccctgtgctgctgacccactgcttggcgcctttgctcgcagggacttccggaaaggctcccctcaactggtctgcagcctgcctggcccccagggcccacccggccccccaggagccccagggccctcaggaatgatgggacgaatgggctttcctggcaaagacggccaagatggacacgacggcgaccggggggacagcggagaggaaggtccacctggccggacaggtaaccggggaaagccaggaccaaagggcaaagccggggccattgggcgggctggcccccgtggccccaagggggtcaacggtacccccgggaagcatggcacaccaggcaagaaggggcccaagggcaagaagggggagccaggcctcccaggcccctgcagctgtggcagtggccataccaagtcagctttctcggtggcagtgaccaagagctacccacgggagcggctgcccatcaagtttgacaagattctgatgaacgagggtggccactacaatgcttccagcggcaagttcgtctgcggcgtgcctgggatctactacttcacctacgacatcacgctggccaacaagcacctggccatcggcctggtgcacaacggccagtaccgcatccggacctttgatgccaacaccggcaaccacgatgtggcctcaggctccaccatcctggctctcaagcagggtgacgaagtttggctgcagatcttctactcagagcagaacgggctcttctatgacccttactggacagacagcctctttacgggcttcctaatctatgccgaccaggatgaccccaacgaggtatagacatgccacggcggtcctccaggcagggaacaagcttctggacttgggcttacagagcaagaccccacaactgtaggctgggggtggggggtcgagtgagcggttctagcctcaggctcacctcctcygcctctttttttccccttcattaaatccaaacctttttattcatcaaaaaaaaaaaaaaaaaactcga

SEQ ID NO: 2892 - DNA, 1114 bp, Homo sapiens; identical to SEQ ID NO: 1182

SEQ ID NO: 2893 - DNA, 2222 bp, Homo sapiens
  misc_feature (931)..(931): n equals a,t,g, or c
  misc_feature (941)..(941): n equals a,t,g, or c
  misc_feature (2207)..(2207): n equals a,t,g, or c
  misc_feature (2211)..(2211): n equals a,t,g, or c
tcggccgcctcagcctcccgcgccgcccgcttggggaacgaggagcaggacgcggcctcggcggggcccgggccgaacggctgcggacacctgggcgccgaggagccgagcgccgccgcctccggcatggatcagtgcgtgacggtggagcgcgagctggagaaggtgctgcacaagttctcgggctacgggcagctgtgcgagcgcggcctggaggagctcatcgactacaccggcggtctcaagcacsagatcctgcagagccacggccaagatgctgaattatcagggacactttcacttgttttgacacagtgctgtaaaagaataaaggatactgttcaaaaattggcctccgaccacaaagacatccacagcagtgtttctcgggttggaaaagccattgataaggattcactttaagagatttggaaactcttccctttggaattgctcytcccatcagagatgcaatttatcactgtcgtgaacagctgcctcagactggccagaagctgtctgtctcttgattggacgtcaggatctttccaagcaggcctgcgaaggaaacttacccaaagggaagtctgtgctctcawcagatgttccttcaggwacagaaactgaggaggaagatgacggcatgaatgacatgaatcacgaggtcatgtcattaatatggagtgaagatttaagggtgcaggrtgtgcgaaggcttcttcagagtgcgcatcctgtccgtgtcaatgtagtgcagtacccagagctcagtgaccacgagttcatcgaggaaaaggaaaacagattgctccaattgtgtcagcgaactatggctcttcctgtaggacgaggaatgtttaccttgctttcgtaccatcctgttccaacagagccattgcctattcctaaattgaatctgactgtctctcantgctcttcgnttggctggatagggcgtgcccctcctcggaacacaacagtagaccttaatagtggaaacatcgatgtgcctyccaayatgacaagctgggsccagctttcataatggtgtggctgctggcctgaagatagctcctgcctccagatcgactcagcttggattgkttacmataagcccaagcatgctgagttggccaatgagtatgctggctttctcatggctctgggtttgaatgggcaccttaccaagctggcgactctcaatatccatgactacttgaccaagggccatgaaatgacaagcattggactgctacttggtgtttctgctgcaaaactaggcaccatggatatgtctattactcggcttcttagcattcgcattcctgctctcttacccccaacgtccacagagctggatgttcctcacaatgtccaagtggctgcagtggttggcattggccttgtatatcaagggacagctcacagacatactgcagaagtcctgttggctgagataggacggcctcctggtcctgaaatggaatactgcactgacagaaagtcatactccttagctgctggcttggccctgggcatggtctgcttggggcacggcagcaatttgataggtatgtctgatctcaatgtgcctgagcagctctatcagtacatggttggaggacataggcgctttcaaacaggaatgcatagggagaaacataaatcaccaagttatcaaatcaaagtaagtacacagcaaagtaatagatcaaaagtctggaagctgggaagttaattggaaaatactagtgttcatcctgacattggtaaatatgttaattttaagcatacttatcagaggaattttataaaaatttagaactcttttacatgcataaactcttctttcaataggaaggagataccataaatgtggatgtgacttgtccaggtgctactctagctttggctatgatctacttaaaaaccaataacagtgtcttctaggaagcccagacacatggagaagttctgagtgttttggccgatagtcccagatgaggttccagcaacagctgggatcacccatgagatgtgagtgaggaaggctttgagatggtttcagccctagccaccactgacctcataagagaccacaagaatgagaatcacctggccaagccyagcagaccttcagaattcagaaataaaataattcatcttattttaaaaaaaaaaaaaaaaaaaactygggggtayttttngggnggcccggggcc

SEQ ID NO: 2894 - DNA, 1950 bp, Homo sapiens; identical to SEQ ID NO: 946

SEQ ID NO: 2895 - DNA, 364 bp, Homo sapiens
  misc_feature (282)..(282): n equals a,t,g, or c
cggcacgaggtcttacctagcgaacaagatcttttcagagtggtgtttctaaaagagcatgtacaaaagtggcctgtggacatttaggcctgggtgatgcatttgctcttcctgtttgtgccaatgtatcaatgtagagttgctctgttttcttcaactgtatttattgctgcatttctcagcataaacttatcccattgtattttttataaataaatattttttttgaactttmawaaaaaaaaaaaaaaaaaaaaaaaaaaaaaaaaaaaraaaaaaaanggggggggggggggggggsgggggggggggggggggggggggggggcccaccaacamtamtgcgccgtaaatacgccccaaa

SEQ ID NO: 2896 - DNA, 1269 bp, Homo sapiens
ggttggaagttacttgcaccccatacctgaaagaaaccctcaacttcatccatttggtcacaggttgtgtcctgggctcctcgggaaaggttctgcccaagtggggctgggagcagttggaagttacttgcaccccatacctgaaagaaaccctcaactccatctggaatgwggaggaccatatcaatcccaagttgccaaacatcagcctggatgtgctacagcccagttttcctgagatcttgctggaatcccacatggtcatgatccgggggaacagtggcctcaaacccaaggacaatgagttcacgtccaaaccctggcactggcctatcaactatcagggcctacgcttctcaggggtcaatgacacagatttccgagtctatctgcttggcaacccggtggtttggtggctgaatctgttgagcatcgccctctacctcctctcagggagcatcattgctgtagccatgcagagaggggcacggctgccagcggaggttgcagggttgtcccaggtcctgctgcgaggaggcggccaggtcctgctcggctggacactccattacttcccgtttttcctgatgggccgggtcctctacttccaccactacttcccagccatgytcttytcaagcatkttkacaggcattctgtgggacaccctcctgcggctctgtgcctggggcttggcctcatggcccctggcgaggggcatacatgtggcgggaatcctgagcctgctcctgggaactgcctacagcttctacctcttccaccctctggcttacgggatggttggtcccctggcccaggacccccaaagtccaatggcaggactaaggtggctggactcatgggacttttgaggccactgcaaagattccagcctgggtccaggaacttcccaggagagccagctgggaagcagtactggaccatcyggccatgaggaagctgcctaaggagcccgaagaattctgctgctcaccaggacccagctctgggagtgcagctggaatggaacccagcattggagagagccgggagagagccgcagctccgtccacagcaccacggagaggacagcgcctcttgggctgctccctcgtgcacagcgcaggggaggatgggtgccagagggtgggagtgggtgcgcgtgtgtgtatgtgagggcatgttgtccatatccctgtggaatacagaccgtgtaactggacagctgagtgtcataaactctaaaatagtccaggctatagtaataaa

SEQ ID NO: 2897 - DNA, 856 bp, Homo sapiens
gaattcccgggtcgacccacgcgtccgccttctctgaggatggacacttctcacactacaaagtcctgtttgctgattcttcttgtggccctactgtgtgcagaaagagctcagggactggagtgttaccagtgctatggagtcccatttgagacttcttgcccatcaattacctgcccctaccctgatggagtctgtgttactcaggaggcagcagttattgtggattctcaaacaaggaaagtaaagaacaatctttgcttacccatctgccctcctaatattgaaagtatggagatcctgggtactaaggtcaacgtgaagacttcctgttgccaggaagacctctgcaatgtagcagttcccaatggaggcagcacctggaccatggcaggggtgcttctgttcagcctgagctcagtcctcctgcagaccttgctctgatggtcctcccaatgacctccacccttgtccttttatcctcatgtgcaacaattcttcctggagccctctagtgatgaattatgagttatagaagctccaaggtgggagtagtgtgtgaaataccatgttttgcctttatagcccctgctgggtaggtaggtgctctaatcctctctagggctttcaagtctgtacttcctagaatgtcattttgttgtggattgctgctcatgaccctggaggcacacagccagcacagtgaagaggcagaattccaaggtattatgctatcaccatccacacataagtatctggggtcctgcaatgttcccacatgtatcctgaatgtccccctgttgagtccaataaaccctttgttctcccaaaaaaaaaaaaaaaaaaaaaaaaaaaa

SEQ ID NO: 2898 - DNA, 2477 bp, Homo sapiens
tcgacccacgcgtccgtctagatcgcgagcggccacycttttttttttttttttttagaacaaaacaggtatatttctattagactacctgatacagaagatagtgtggtatggatggatagtatgaaggacaaataatacaaatatattttattgaaataaacaaaaatgcatacacagctcaatgggtcacttggaacaaacttgcttgactatattactgagcagaaacaaaacggaagcacaaacacctttctttttttgacatgtatctggagataggtaggaagacactacttggttttttaaaaaactgaccttcccttaaggcctggtcatagaagtgtaaacaatgtaaatgaatccaccattaccagttgtcatatcatatctatgtcacctgtgtattctgagattacacacatacctgccaatatacctgggaaaggttattttatcacagttacacttgagttcttggcaggcaggactgaggaagagtaatttgaaagaagttttacatcctatttagaagaaatcactagtatttccttaaataacaggttacaatagaaagatactgcctggaagttatcctttcactttggttcatttttagtttttctttatgatttacatagctgtttaattcatttgcttatagtacaatcctgccataaagtattaaagcacaagatacctattattccttcaacatctgcatttttcaagttttatactctacatccacagtacgtcagcagttcttgaatgtttaaaaaaataaatgggtaaaatgcttctaaaaaatgcagatgtttataactacaatggtactaagatgggaaggagacaatgagagaagggataaaagcaaacatgttcatgtgcagggaatgtggttcaagtctttggatttaaaaacaagttccccagagaagctggcacttcctttgccctccaaaaaggacctgaaaagtcccaatccaaactttagaaaattagttatgagatgcaataaatgatgatcaaagcagtcagagggagaaggatgaatgtgtcttccatttagctagagactgtagcatagcctctttaggtgttggtggatcagtaaaaacgactgaagtaccagaagtgcttggaaggataggggtacaaagtaatgaccataataccttgtctaaatcagtagcagggcttcatggctaggaaacttttttaaacagtaaaatgtcattaggatagatcactctctcaccaacattaaatgtggcagaattaaccaaaaaaaaaaaaaaaaaaagaaaaaaagatttacacgtagatatagcagtaacagaaaattacaaggcagagaacacaaaagaatcaagacaacgctataggttcaacagtattccatgaggctagaaaaccggttaactttgaaagccctagcaaaatatcactcttgtttataaatcacttatttatcatatgaccacacgttgaatccttgtctttccacatactgaagaatcctacattcagcctttaagcattctgcatttctttgccaatcttgtagctgagtatcttgttccagtcgattttggtgcgggtaactggaagctgccggcgcaaggccttgaatgtggtatctgacattgtttgatagttttcactaattgctgtctgatactcattttctgcattctctatgattttaataaactccttggcagtttgggcttcattcgaaacagttagtgaatcctgtacatctttatgactaaccaactgaacattgccatcttcataatagtgaacctgaatcttaagcacgccaaccacctgggctgtaggtggtgtgatggtgaacttccactctgatctccaacgaccattccagaagtttttaggctgaaactggtggctttcaatacatgcaataatagtctgttgcccatcgatagttttagcataaacagtacagaagccgttggaataatggtctttcacataggctcttaaagcactgtcacaggattctctccaagacttcagacctccatctgcttcttctggctgggggtcacttgcttctttccgtaagtggtcaaatttaaaggaaattttgtttcttggatctaaaaatctgctattacccaggtcaccgtgctctgtaattaagacctgatcttcatatccttctatcttcacaggcgtgaactgatccatgttatactgggcaaatgcatgtgctgccccttccctgaggagattgtcattattaagtagtagccgaacgtcattgaatacttcattaaattcccctgggggtgcatgagtgatgaatttagcagctatgcgtaccttctcctcatccgacacacgatcatcgaagtcggccatcttgggctgttctggcccagcccggctacgggcgcgaggcaggccgggaagaaagccgagtgatggaatcaccgcggcgg

SEQ ID NO: 2899 - DNA, 1106 bp, Homo sapiens
  misc_feature (1042)..(1042): n equals a,t,g, or c
  misc_feature (1046)..(1046): n equals a,t,g, or c
  misc_feature (1058)..(1058): n equals a,t,g, or c
  misc_feature (1101)..(1101): n equals a,t,g, or c
tcccgggtcgacccacgcgtccgcaagagtacatctcttttcaaatagctggattaggtcctcatgctgctgtggtcattgctggtcatctttgatgcagtcactgaacaggcagattcgctgacccttgtggcgccctcttctgtcttcgaaggagacagcatcgttctgaaatgccagggagaacagaactggaaaattcagaagatggcttaccataaggataacaaagagttatctgttttcaaaaaattctcagatttccttatccaaagtgcagttttaagtgacagtggtaactatttctgtagtaccaaaggacaactctttctctgggataaaacttcaaatatagtaaagataaaagtccaagagctctttcaacgtcctgtgctgactgccagctccttccagcccatcgaagggggtccagtgagcctgaaatgtgagacccggctctctccacagaggttggatgttcaactccagttctgcttcttcagagaaaaccaggtcctggggtcaggctggagcagctctccggagctccagatttctgccgtgtggagtgaagacacagggtcttactggtgcaaggcagaaacggtgactcacaggatcagaaaacagagcctccaatcccagattcacgtgcagagaatccccatctctaatgtaagcttggagatccgggcccccgggggacaggtgactgaaggacaaaaactgatcctgctctgctcagtggctgggggtacaggaaatgtcacattctcctggtacagagaggccacasgaaccagtatgggwwagaaaacsmagcgttccctgtcagcagagctggagatcccagctgtgaaagagagtgatgccggcaaatattactgtagagctgacaacggccatgtgcctatccagagcaaggtggtgaatatccctgtgagaattccagtggctcgccctgtcctcaccctcaggtcttctggggcccaggctgcagtgggggacctgctggagcttcactgtgagggccttgagaggntctnccccaatcttgnaccaatttatcatgaggatgtcaccctttgggaacagctcggncccct

SEQ ID NO: 2900 - DNA, 1138 bp, Homo sapiens
  misc_feature (504)..(504): n equals a,t,g, or c
ttctcaggtctggagcatgcacgcacgccagaaagctcagcaaacatcaggtcacttctggagaacaaggactcccaagtcatctactcttctgtgaagaaatcataacacttggaggaatcagaagggaagatcaacagcaaggatggggcatcattaagacttgctataaaaccttatgaaaatgcttgaggcttatcacctgccacagccagaacgtgcctcaggaggcacctcctgtcatttttgtcctgatgatgtttcttctccaatatcttcttttacctatcaatattcattgaactgctgctacatccagacactgtgcaaataaattatttctgctaccttctcttaagcaatcagtgtgtaaagatttgagggaagaatgaataagagatacaaggtctcacctgcatctactgtgaagtgatgagaacaggacttgatagtggtgtattaacttatttatgtgctgctggatacagtttgctaatattttgntgagaatttttgcaaatatgttcattgggaatattggsctgaaattttcttttccactgtgtctctgccagaatgtttgtatcaggctgatgctggcttcatagaatgagttaggcaggagcccttcctccttgattttttggcatagtttcagcaggattggtaccagttattctttctgcatcttgtagaattcagctatgaatccatctggtctagggcttttgtgttggttggtaagttttttawtactaattcaacttcagcgcttgatattggtctaggaggggtttctgtctcttcctggttcaatcttgggagattgtgtgtttccaggaatttagccgtttcctccagattttcttctttatgtgcatcgacttgagtgtaaacataacttatatgcactgggaaaccaaaaaatctgtgtgacttgctttattgcagcatttgttttattttggtagtctggaactgaacctgcaatatcaccaaagtatgcatatagttgcaaaaatgtgatttttgacatagtaaatatgagtatttgcaataaactatgatattacttttgtaagtatatagaataaaatgtaaataatctawaaaaaaaaaaaaaaaaaagggcggccgc

SEQ ID NO: 2901 - DNA, 619 bp, Homo sapiens
ttccgaaatttctggctgctgcctgctccagacctgagaataaaccacatccacatctacagaagcccacattgacatacactggctgcagctcctccatgtctggggttgggcttgaataggtgaactcttgaggatttggcctggaagcccctctgggttcattagtggcagaactttctcctgatatcttgtggaacaaggcatacaacagcaaagcaacaccagtgaaaccaaggacmccaaacagtccccagagaactccagctgtcatgaggtctcttctatagccatcaggtcctgagatggagactggcactgcctcactgcactgggcccccaggccgttgttggcctcacaggagtagtttccagaatgttttctcacagggatattcaccaccttgctctggatargcacatggccgttgtcagctctacagtaatatttgccggcatcactctctttcacagctgggatctccagctctgctgacagggaacgctgggtttctttcccatactggttacctgtggcctstctgtaccargaraatgtgamakkkcctgwaccccaccactgaacaaacaggatcagtttttgtcctcaatcactgtc

SEQ ID NO: 2902 - DNA, 2383 bp, Homo sapiens
acccacgcgtccgctcttttcaaatagctggattaggtcctcatgctgctgtggtcattgctggtcatctacgatgcagtcactgaacaggcagattcgctgacccttgtggcgccctcttctgtcttcgaaggagacagcatcgttctgaaatgccagggagaacagaactggaaaattcagaagatggcttaccataaggataacaaagagttatctgttttcaaaaaattctcagatttccttatccaaagtgcagttttaagtgacagtggtaactatttctgtagtaccaaaggacaactctttctctgggataaaacttcaaatatagtaaagataaaagtccaagagctctttcaacgtcctgtgctgactgccagctccttccagcccatcgaagggggtccagtgagcctgaaatgtgagacccggctctctccacagaggttggatgttcaactccagttctgcttcttcagagaaaaccaggtcctggggtcaggctggagcagctctccggagctccagatttctgccgtgtggagtgaagacacagggtcttactggtgcaaggcagaaacggtgactcacaggatcagaaaacagagcctccaatcccagattcacgtgcagagaatccccatctctaatgtaagcttggagatccgggcccccgggggacaggtgactgaaggacaaaaactgatcctgctctgctcagtggctgggggtacaggaaatgtcacattctcctggtacagagaggccacaggaaccagtatgggaaagaaaacccagcgttccctgtcagcagagctggagatcccagctgtgaaagagagtgatgccggcaaatattactgtagagctgacaacggccatgtgcctatccagagcaaggtggtgaatatccctgtgagaaaacattctggaaactactcctgtgaggccaacaacggcctgggggcccagtgcagtgaggcagtgccagtctccatctcaggacctgatggctatagaagagacctcatgacagctggagttctctggggactgtttggtgtccttggtttcactggtgttgctttgctgttgtatgccttgttccacaagatatcaggagaaagttctgccactaatgaacccagaggggcttccaggccaaatcctcaagagttcacctattcaagcccaaccccagacatggaggagctgcagccagtgtatgtcaatgtgggctctgtagatgtggatgtggtttattctcaggtctggagcatgcagcagccagaaagctcagcaaacatcaggacacttctggagaacaaggactcccaagtcatctactcttctgtgaagaaatcataacacttggaggaatcagaagggaagatcaacagcaaggatggggcatcattaagacttgctataaaaccttatgaaaatgcttgaggcttatcacctgccacagccagaacgtgcctcaggaggcacctcctgtcatttttgtcctgatgatgtttcttctccaatatcttcttttacctatcaatattcattgaactgctgctacatccagacactgtgcaaataaattatttctgctaccttctcttaagcaatcagtgtgtaaagatttgagggaagaatgaataagagatacaaggtctcacctgcatctactgtgaagtgatgagaacaggacttgatagtggtgtattaacttatttatgtgctgctggatacagtttgctaatattttgttgagaatttttgcaaatatcttgggaatatgggctgaaattttcttttccactgtgtctctgccagaatgtttgtatcaggctgatgctggcttcatagaatgagttaggcaggagcccttcctccttgattttttggcatagtttcagcaggattggtaccagttattctttctgcatcttgtagaattcagctatgaatccatctggtctagggcttttgtgttggttggtaagttttttattactaattcaacttcagcgcttgatattggtctaggaggggtttctgtctcttcctggttcaatcttgggagattgtgtgtttccaggaatttagccgtttcctccagattttcttctttatgtgcatcgacttgagtgtaaacataacttatatgcactgggaaaccaaaaaatctgtgtgacttgctttattgcagcatttgttttattttggtagtctggaactgaacctgcaatatcaccaaagtatgcatatagttgcaaaaatgtgatttttgacatagtaaatatgagtatttgcaataaactatgatattacttttgtaagtatatagaataaaatgtaaataatctataaaaaaaaaaaaaaa

SEQ ID NO: 2903 - DNA, 2416 bp, Homo sapiens
ccacgcgtccggctaaatatagacgggagtgcttgtggtttgatcatcaaaggagccatgatgggtgagaggtgtctagctctgaatgtcctgtttgctggggttgcttcttgccagaggcttttcagcaggaatcttagctgtcactgctttggggactattgtgatccttctctctagagctctttcaacgtcctgtgctgactgccagctccttccagcccatcgaagggggtccagtgagcctgaaatgtgagacccggctctctccacagaggttggatgttcaactccagttctgcttcttcagagaaaaccaggtcctggggtcaggctggagcagctctccggagctccagatttctgccgtgtggagtgaagacacagggtcttactggtgcaaggcagaaacggtgactcacaggatcagaaaacagagcctccaatcccagattcacgtgcagagaatccccatctctaatgtaagcttggagatccgggcccccgggggacaggtgactgaaggacaaaaactgatcctgctctgctcagtggctgggggtacaggaaatgtcacattctcctggtacagagaggccacaggaaccagtatgggaaagaaaacccagcgttccctgtcagcagagctggagatcccagctgtgaaagagagtgatgccggcaaatattactgtagagctgacaacggccatgtgcctatccagagcaaggtggtgaatatccctgtgagaattccagtggctcgccctgtcctcaccctcaggtcttctggggcccaggctgcagtgggggacctgctggagcttcactgtgagggccttgagaggtctccccaatcttgtaccaatttatcatgaggatgtcacccttgggaacagctcggccccctctggaggaggggcctccttcaacctctctttgactgcagaacattctggaaactactcctgtgaggccaacaacggcctgggggcccagtgcagtgaggcagtgccagtctccatctcaggacctgatggctatagaagagacctcatgacagctggagttctctggggactgtttggtgtccttggtttcactggtgttgctttgctgttgtatgccttgttccacaagatatcaggagaaagttctgccactaatgaacccagaggggcttccaggccaaatcctcaagagttcacctattcaagcccaaccccagacatggaggagctgcagccagtgtatgtcaatgtgggctctgtacatgtggatgtggtttattctcaggtctggagcatgcagcacgccagaaagctcagcaaacatcaggacacttctggagaacaaggactcccaagtcatctactcttctgtgaagaaatcataacacttggaggaatcagaagggaagatcaacagcaaggatggggcatcattaagacttgctataaaaccttatgaaaatgcttgaggcttatcacctgccacagccagaacgtgcctcaggaggcacctcctgtcatttttgtcctgatgatgtttcttctccaatatcttcttttacctatcaatattcattgaactgctgctacatccagacactgtgcaaataaattatttctgctaccttctcttaagcaatcagtgtgtaaagatttgagggaagaatgaataagagatacaaggtctcacctgcatctactgtgaagtgatgagaacaggacttgatagtggtgtattaacttatttatgtgctgctggatacagtttgctaatattttgttgagaatttttgcaaatatgttcattgggaatattggcctgaaattttcttttccactgtgtctctgccagaatgtttgtatcaggctgatgctggcttcatagaatgagttaggcaggagcccttcctccttgattttttggcatagtttcagcaggattggtaccagttattctttctgcatcttgtagaattcagctatgaatccatctggtctagggcttttgtgttggttggtaagttttttattactaattcaacttcagcgcttgatattggtctaggaggggtttctgtctcttcctggttcaatcttgggagattgtgtgtttccaggaatttagccgtttcctccagattttcttctttatgtgcatcgacttgagtgtaaacataacttatatgcactgggaaaccaaaaaatctgtgtgacttgctttattgcagcatttgttttattttggtagtctggaactgaacctgcaatatcaccaaagtatgcatatagttgcaaaaatgtgatttttgacatagtaaatatgagtatttgcaataaactatgatattacttttgtaagtatatagaataaaatgtaaataatctaaaaaaaaaaaaaaaaaaaa

SEQ ID NO: 2904 - DNA, 1614 bp, Homo sapiens
ccacgcgtccgcggacgcgtgggtgaccgcgggcgggtggggcgccgggtgaagaaaccaagacgcagagaggccaagccccttgccttgggtcacacagccaaaggaggcagagccagaactcacaaccagatccagaggcaacagggacatggccacctgggacgaaaaggcagtcacccgcagggccaaggtggctcccgctgagaggatgagcaagttcttaaggcacttcacggtcgtgggagacgactaccatgcctggaacatcaactacaagaaatgggagaatgaagaggaggaggaggaggaggagcagccaccacccacaccagtctcaggcgaggaaggcagagctgcagcccctgacgttgcccctgcccctggccccgcacccagggcccccccttgacttcaggggcatgttgaggaaactgttcagctcccacaggtttcaggtcatcatcatctgcttggtggttctggatgccctcctggtgcttgctgagctcatcctggacctgaagatcatccagcccgacaagaataactatgctgccatggtattccactacatgagcatcaccatcttggtcttttttatgatggagatcatctttaaattatttgtcttccgcctggagttctttcaccacaagtttgagatcctggatgccgtcgtggtggtggtctcattcatcctcgacattgtcctcctgttccaggagcaccagtttgaggctctgggcctgctgattctgctccggctgtggcgggtggcccggatcatcaatgggattatcatctcagttaagacacgttcagaacggcaactcttaaggttaaaacagatgaatgtacaattggccgccaagattcaacaccttgagttcagctgctctgagaaggaacaagaaattgaaagacttaacaaactattgcgacagcatggacttcttggtgaagtgaactagacccggaccagctcccctcaaaaagaagacactgtctcatgggcctgtgctgtcacgagaggaacagctgcccctcctgggccgcttggtgagaggtttggtttgatacctctgcctccctcctgccagcatggattctgggtggacacagccttgtggaaggtccagtaccaccaagagctgcccatccactcccaccccacactgtatcaaatgtatcacattttctcatgttgaacactttagccttaattgaaaatgagcaacaaagctggacaattgctagttgtatataaaatttaatctcaccgaatgtacagttttcaaatttcacgtgtatattaaggaactgatgcatctgagcattctgaaagaaagaaaaagaagctactttagctgccaccccattctagaaaagtctcttattttcaagctgttctaaatagcttcgtctcagtttccccaaaaggggtacccaggcccctcctctgtgtgccccagctgcatcagccagcttctaggtggctccattgttttctgccacctgacaacatttttcctcaattactgtacaactactgtataaaataaaacaactactgtataaaataaaaaaaaaaaaaaaaaaaagggcggccgc

SEQ ID NO: 2905 - DNA, 1500 bp, Homo sapiens
  misc_feature (19)..(19): n equals a,t,g, or c
  misc_feature (21)..(21): n equals a,t,g, or c
  misc_feature (25)..(25): n equals a,t,g, or c
  misc_feature (53)..(53): n equals a,t,g, or c
  misc_feature (74)..(74): n equals a,t,g, or c
  misc_feature (166)..(166): n equals a,t,g, or c
  misc_feature (174)..(174): n equals a,t,g, or c
  misc_feature (1482)..(1482): n equals a,t,g, or c
  misc_feature (1490)..(1490): n equals a,t,g, or c
ttcccgggttcgaaccaangngtcngcgctttttagccagtcacccgcaaggncaaaggtggcttcccgctganaggatgagcaagttcttaaggcacttcacggtcgtggaagacgacttaccatgcctggaacatcaactacaagaaatgggagaatgaagagnagaggagnaggaggagcagccaccacccacaccagtctcaggcgaggaaggcagagctgcagcccctgacgttgcccctgcccctggccccgcacccagggcccccccttgacttcaggggcatgttgaggaaactgttcagctcccacaggtttcaggtcatcatcatctgcttggtggttctggatgccctcctggtgcttgctgagctcatcctggacctgaagatcatccagcccgacaagaataactatgctgccatggtattccactacatgagcatcaccatcttggtcttttttatgatggagatcatctttaaattatttgtcttccgcctggagttctttcaccacaagtttgagatcctggatgccgtcgtggtggtggtctcattcatcctcgacattgtcctcctgttccaggagcaccagtttgaggctctgggcctgctgattctgctccggctgtggcgggtggcccggatcatcaatgggattatcatctcagttaagacacgttcagaacggcaactcttaaggttaaaacagatgaatgtacaattggccgccaagattcaacaccttgagttcagctgctctgagaaggaacaagaaattgaaagacttaacaaactattgcgacagcatggacttcttggtgaagtgaactagacccggaccagctcccctcaaaaagaagacactgtctcatgggcctgtgctgtcacgagaggaacagctgcccctcctgggccgcttggtgagaggtttggtttgatacctctgcctccctcctgccagcatggattctgggtggacacagccttgtggaaggtccagtaccaccaagagctgcccatccactcccaccccacactgtatcaaatgtatcacattttctcatgttgaacactttagccttaattgaaaatgagcaacaaagctggacaattgctagttgtatataaaatttaatctcaccgaatgtacagttttcaaatttcacgtgtatattaaggaactgatgcatctgagcattctgaaagaaagaaaaagaagctactttagctgccaccccattctagaaaagtctcttattttcaagctgttctaaatagcttcgtctcagtttccccaaaaggggtacccaggcccctcctctgtgtgccccagctgcatcagccagcttctaggtggctccattgttttctgccacctgacaacatttttcctcaattactgtacaactactgtataaaataaaacaactactgtataaaataaactctctcttttccctggaaaaaaaaaaanaaataaanaaacctcgag

SEQ ID NO: 2906 - DNA, 1454 bp, Homo sapiens
cccacgcgtccgcgccttctaggcagtcacccgcagggccaaggtggctcccgctgagaggatgagcaagttcttaaggcacttcacggtcgtgggagacgactaccatgcctggaacatcaactacaagaaatgggagaatgaagaggaggaggaggaggaggagcagccaccacccacaccagtctcaggcgaggaaggcagagctgcagcccctgacgttgcccctgcccctggccccgcacccagggcccccccttgacttcaggggcatgttgaggaaactgttcagctcccacaggtttcaggtcatcatcatctgcttggtggttctggatgccctcctggtgcttgctgagctcatcctggacctgaagatcatccagcccgacaagaataactatgctgccatggtattccactacatgagcatcaccatcttggtcttttttatgatggagatcatctttaaattatttgtcttccgcctggagttctttcaccacaagtttgagatcctggatgccgtcgtggtggtggtctcattcatcctcgacattgtcctcctgttccaggagcaccagtttgaggctctgggcctgctgattctgctccggctgtggcgggtggcccggatcatcaatgggattatcatctcagttaagacacgttcagaacggcaactcttaaggttaaaacagatgaatgtacaattggccgccaagattcaacaccttgagttcagctgctctgagaaggaacaagaaattgaaagacttaacaaactattgcgacagcatggacttcttggtgaagtgaactagacccggaccagctcccctcaaaaagaagacactgtctcatgggcctgtgctgtcacgagaggaacagctgcccctcctgggccgcttggtgagaggtttggtttgatacctctgcctccctcctgccagcatggattctgggtggacacagccttgtggaaggtccagtaccaccaagagctgcccatccactcccaccccacactgtatcaaatgtatcacattttctcatgttgaacactttagccttaattgaaaatgagcaacaaagctggacaattgctagttgtatataaaatttaatctcaccgaatgtacagttttcaaatttcacgtgtatattaaggaactgatgcatctgagcattctgaaagaaagaaaaagaagctactttagctgccaccccattctagaaaagtctcttattttcaagctgttctaaatagcttcgtctcagtttccccaaaaggggtacccaggcccctcctctgtgtgccccagctgcatcagccagcttctaggtggctccattgttttctgccacctgacaacatttttcctcaattactgtacaactactgtataaaataaaacaactactgtataaaataaaaaaaaaaaaaaaaaaaa

SEQ ID NO: 2907 - DNA, 1264 bp, Homo sapiens
  misc_feature (1263)..(1263): n equals a,t,g, or c
cggacgcgtgggggcctcacaggaggagttggcggggagccttgggcccctctggcctcagccggatttcccagccaaacgcagagagagatgccctggaccatcttgctctttgcagctggctccttggcgatcccagcaccatccatccggctggtgcccccgtacccaagcagccaagaggaccccatccacatcgcatgcatggcccctgggaacttcccgggggcgaatttcacactgtatcgaggggggcaggtggtccagctcctgcaggcccccacggaccagcgcggggtgacatttaacctgagcggcggcagcagcaaggctccarggggacccttccactgccagtatggagtgttaggtgagctcaaccagtcccagctgtcagacctcagcgagcccgtgaacgtctccttcccagtgcccacttggatcttggtgctctccctgagcctggctggtgccctcttcctccttgctgggctggtggctgttgccctggtggtcagaaaagttaaactcagaaatttacagaagaaaagagatcgagaatcctgctgggcccagattaacttcgacagcacagacatgtccttcgataactccctgtttaccgtctccgcgaaaacgatgccagaagaagacccggccaccttggatgatcactcaggcaccactgccacccccagcaactccaggacccggaagaggcccacttccacgtcctcctcgcctgagacccccgaattcagcactttccgggcctgccagtgaggctgaggactgggggacccctctgtctccaggcattcgggggcctgaggtccctccagctacttctgggggggctctgtcagccactttctcagggaattggacagaggaaaggaaggggaaccctggccttgggattttcatcacagaggagtgggagaggggacacaggcatgggcctggcactatacagacaacaggaagttcccctctcgaccttcggctcctcaggaccaccagagaaggagatgtcaggaccccttcttgtcccccagctgggccataagacgtcccaggtctctgcacacccgtggaattcctcccttccccagtgggtttttgagcatagggtgcccttgggtgtgttgtgtgtctgcctgctggcttgcttaagttattaattataacacgggtcaaggtgttaaaaaaaaaaaaaaaaaaaaaaaaaaaaaaaaaaaaaaaaaassaggggggggcccng

SEQ ID NO: 2908 - DNA, 2888 bp, Homo sapiens
cggttgaacttgagagaccagatcaggcartgccgcttaataccatcacatgatcctccccgaggccctgtatttaattaaaatagagagggaggcaccacagatgccagaagaacactgttgctcttggtggacgggcccagaggaattcagagttaaaccttgagtgcctgcgtccgtgagaattcagcatggaatgtctctactatttcctgggatttctgctcctggctgcaagattgccacttgatgccgccaaacgatttcatgatgtgctgggcaatgaaagaccttctgcttacatgagggagcacaatcaattaaatggctggtcttctgatgaaaatgactggaatgaaaaactctacccagtgtggaagcggggagacatgaggtggaaaaactcctggaagggaggccgtgtgcaggcggtcctgaccagtgactcaccagccctcgtgggctcaaatataacatttgcggtgaacctgatattccctagatgccaaaaggaagatgccaatggcaacatagtctatgagaagaactgcagaaatgaggctggtttatctgctgatccrtatgtttacaactggacagcatggtcagaggacagtgacggggaaaatggcaccggccaaagccatcataacgtcttccctgatgggaaaccttttcctcaccaccccggatggagaagatggaatttcatctacgtcttccacacacttggtcagtatttccagaaattgggacgatgttcagtgagagtttctgtgaacacagccaatgtgacacttgggcctcaactcatggaagtgactgtctacagaagacatggacgggcatatgttcccatcgcacaagtgaaagatgtgtacgtggtaacagatcagattcctgtgtttgtgactatgttccagaagaacgatcgaaattcatccgacgaaaccttcctcaaagatctccccattatgtttgatgtcctgattcatgatcctagccacttcctcaattattctaccattaactacaagtggagcttcggggataatactggcctgtttgtttccaccaatcatactgtgaatcacacgtatgtgctcaatggaaccttcagccttaacctcactgtgaaagctgcagcaccaggaccttgtcgcgccaccgccaccaccacccagaccttcaaaacccaccccttctttagcaactactctaaaatcttatgattcaaacaccccaggacctgctggtgacaaccccctggagctgagtaggattcctgatgaaaactgccagattaacagatatggccactttcaagccaccatcacaattgtagagggaatcttagaggttaacatcatccagatgacagacgtcctgatgccggtgccatggcctgaaagctccctaatagactttgtcgtgacctgccaagggagcattcccacggaggtctgtaccatcatttctgaccccacctgcgagatcacccagaacacagtctgcagccctgtggatgtggatgagatgtgtctgctgactgtgagacgaaccttcaatgggtctgggacgtactgtgtgaacctcaccctgggggatgacacaagcctggctctcacgagcaccctgatttctgttcctgacagagacccagcctcgcctttaaggatggcaaacagtgccctgatctccgttggctgcttggccatatttgtcactgtgatctccctcttggtgtacaaaaaacacaaggaatacaacccaatagaaaatagtcctgggaatgtggtcagaagcaaaggcctgagtgtctttctcaaccgtgcaaaagccgtgttcttcccgggaaaccaggaaaaggatccgctactcaaaaaccaagaatttaaaggagtttcttaaatttcgaccttgtttctgaagctcacttttcagtgccattgatgtgagatgtgctggagtggctattaacctttttttcctaaagattattgttaaatagatattgtggtttggggaagttgaattttttataggttaaatgtcattttagagatggggagagggattatactgcaggcagcttcagccatgttgtgaaactgataaaagcaacttagcaaggcttcttttcattattttttatgtttcacttataaagtcttaggtaactagtaggatagaaacactgtgtcccgagagtaaggagagaagctactattgattagagcctaacccaggttaactgcaagaagaggcgggatactttcagctttccatgtaactgtatgcataaagccaatgtagtccagtttctaagatcatgttccaagctaactgaatcccacttcaatacacactcatgaactcctgatggaacaataacaggcccaagcctgtggtatgatgtgcacacttgctagactcagaaaaaatactactctcataaatgggtgggagtattttggtgacaacctactttgcttggctgagtgaaggaatgatattcatatattcatttattccatggacatttagttagtgctttttatataccaggcatgatgctgagtgacactcttgtgtatatttccaaatttttgtayagtcgctgcacatatttgaaatcatatattaagactttccaaagatgaggtccctggtttttcatggcaacttgatcagtaaggatttcacctctgtttgtaactaaaaccatctactatatgttagacatgacattctttttctctccttcctgaaaaataaagtgtgggaagagacaaaaaaaaaaaaaaaaaaaaaaaaaaaaaaaaaaaaaaaaaaaaaaaaaaaaaaaaaaaaaaaaaaaaaaaaaaaaaaaaaaaaaaaaaaaaggg

SEQ ID NO: 2909 - DNA, 730 bp, Homo sapiens
taccggtccggaattcccgggtcgacccacgcgtccggagagcacaaccatgaaaccagtcacggcctctgctctgctgcttatcctgctgggtgtggcctggcgtggagacagccacagctggggttcagatctgtcatctctgcagaagagggcaggtggcgctgaccagttttctaagcctgaagcaagacaagatctttcagctgactcatccaagaactactacaataaccagcaggtgaatcctacttacaactggcaatactataccaagaccactgccaaggcgggagtcacaccttcatcttcctcggcttcccgggcacaacctggcctgctgaagtggctgaagttttggtagaacattccttctagtcactgcggactcctcacgaatgcacacaggtcttcagggagtttgactgtccttacccagagtcctctctgatgcagctgacctacctgggcatgacaagcctgtcatctcgcctggggacctggtttatctgtcctcattctccccattcgattgtggtgtcttggcgactaatcagtttcattgtataaccagccagatcttcacctcttcttccgtacgtgaccgcaagtccctggaacgaggcatctggagcttcctactctccagtttctctgtggaaataaaacatgactctttgtttccctgagaaaaaaaaaaaaaaaaaaaaaaaaaaaaaaaaaaaaaaaa

SEQ ID NO: 2910 - DNA, 711 bp, Homo sapiens
ccacgcgtccggagagcacaaccatgaaaccagtcacggcctctgctctgctgcttatcctgctgggtgtggcctggcgtggagacagccacagctggggttcagatctgtcatctctgcagaagagggcaggtggcgctgaccagttttctaagcctgaagcaagacaagatctttcagctgactcatccaagaactactacaataaccagcaggtgaatcctacttacaactggcaatactataccaagaccactgccaaggcgggagtcacaccttcatcttcctcggcttcccgggcacaacctggcctgctgaagtggctgaagttttggtagaacattccttctagtcactgcggactcctcacgaatgcacacaggtcttcagggagtttgactgtccttacccagagtcctctctgatgcagctgacctacctgggcatgacaagcctgtcatctcgcctggggacctggtttatctgtcctcattctccccattcgattgtggtgtcttggcgactaatcagtttcattgtataaccagccagatcttcacctcttcttccgtacgtgaccgcaagtccctggaacgaggcatctggagcttcctactctccagtttctctgtggaaataaaacatgactctttgtttccctgagaaaaaaaaaaaaaaaaaaaaaaaaaaaaaaaaaaaaaaaaaaaaaaa

SEQ ID NO: 2911 - protein, 204 aa, Homo sapiens
MNLSLVLAAFCLGIASAVPKFDQNLDTKWYQWKATHRRLYGANEEGWRRAVWEKNMKMIELHNGEYSQGKHGFTMAMNAFGDMTNEEFRQMMGCFRNQKFRKGKVFREPLFLDLPKSVDWRKKGYVTPVKNQKQCGSCWAFSATGALEGQMFRKTGKLVSLSEQNLVDCSRPQGNQGCNGGFMARPSSMSRRTEAWTLRNPIHM

SEQ ID NO: 2912 - protein, 69 aa, Homo sapiens
MHAPSVLCPSPLPRARSSSVALCPLLYLSVLVWLSRHPPCLCLSPGRTGWPSGKVVLGHGAEQVTGGNR

SEQ ID NO: 2913 - protein, 175 aa, Homo sapiens
MEKIPVSAFLLLVALSYTLARDTTVKPGAKKDTKDSRPKLPQTLSRGWGDQLIWTQTYEEALYKSKTSNKPLMIIHHLDECPHSQALKKVFAENKEIQKLAEQFVLLNLGYETTDKHLSPDGQYVPRIMFVDPSLTVRADITGRYSNRLYAYEPADTALLLDNMKKALKLLKTEL

SEQ ID NO: 2914 - protein, 62 aa, Homo sapiens
MQKKNSLFFFFAFYYENKTNAPGEGSMITRNIKEYFLPFLFCCVEASIAINKLNYLHWTHFQ

SEQ ID NO: 2915 - protein, 182 aa, Homo sapiens
VRKSRVAMEKIPVSAFLLLVALSYTLARDTTVKPGAKKDTKDSRPKLPQTLSRGWGDQLIWTQTYEEALYKSKTSNKPLMIIHHLDECPHSQALKKVFAENKEIQKLAEQFVLLNLVYETTDKHLSPDGQYVPRIMFVDPSLTVRADITGRYSNRLYAYEPADTALLLDNMKKALKLLKTEL

SEQ ID NO: 2916 - protein, 393 aa, Homo sapiens
MTKARLFRLWLVLGSVFMILLIIVYWDSAGAAHFYLHTSFSRPHTGPPLPTPGPDRDRELTADSDVDEFLDKFLSAGVKQSDLPRKETEQPPAPGSMEESVRGYDWSPRDARRSPDQGRQQAERRSVLRGFCANSSLAFPTKERAFDDIPNSELSHLIVDDRHGAIYCYVPKVACTNWKRVMIVLSGSLLHRGAPYRDPLRIPREHVHNASAHLTFNKFWRRYGKLSRHLMTGQAQEVHQVPLRARPLRAPDLRLPQQVRAGERGVLPQVRRAHAAAVRQPHQPARLGARGLPRWPQGVLRQLHPVPAGPAHGEAGALQRALAAGVPPLPPVPDRLRLRGEAGDSGRGRRAAAAATPGGPAAPLPPELPEQDRQQLGGGLVRQDPPGLEAAAV

SEQ ID NO: 2917 - protein, 392 aa, Homo sapiens
MTKARLFRLWLVLGSVFMILLIIVYWDSAGAAHFYLHTSFSRPHTGPPLPTPGPDRDRELTADSDVDEFLDKFLSAGVKQSDLPRKETEQPPAPGSMEESVRGYDWSPRDARRSPDQGRQQAERRSVLRGFCANSSLAFPTKERAFDDIPNSELSHLIVDDRHGAIYCYVPKVACTNWKRVMIVLSGSLLHRGAPYRDPLRIPREHVHNASAHLTFNKFWRRYGKLSRHLMKVKLKKYTKFLFVRDPFVRLISAFRSKFELENEEFYRKFAVPMLRLYANHTSCPPRRARPSALASRCPSPTSSSTCWTRTRRSWRPSTSTGGRCTASATRARSTTTSWGSWRLWTRTPRSCCSYSRWTGTPLPPELPEQDRQQLGGGLVRQDPPGLEAAAV

SEQ ID NO: 2918 - protein, 94 aa, Homo sapiens
MLVSVSFMASAKSARSARCCQRSLSDLSSLLELAKPLVLTSGVTPEAAIYVLPMVLILVITRNLGLSRRESKSEMISLRKRRHSIPPLLMLSSV

SEQ ID NO: 2919 - protein, 113 aa, Homo sapiens
  SITE (38): Xaa equals any amino acid
  SITE (77): Xaa equals any amino acid
MCLQEKCGLPSSPWMPVGCLPHPGCLWAAFLTLDACGXPSSPWMPVGCLPHPGCLWAAFLTLDACGLPSSPWMPVGXLPHPGCLWAAFLTLDACGQPSSPWMPVGSLPHPGCL

SEQ ID NO: 2920 - protein, 267 aa, Homo sapiens
MTLGRRLACLFLACVLPALLLGGTALASEIVGGRRARPHAWPFMVSLQLRGGHFCGATLIAPNFVMSAAHCVANVNVRAVRVVLGAHNLSRREPTRQVFAVQRIFENGYDPVNLLNDIVILQLNGSATINANVQVAQLPAQGRRLGNGVQCLAMGWGLLGRNRGIASVLQELNVTVVTSLCRRSNVCTLVRGRQAGVCFGDSGSPLVCNGLIHGIASFVRGGCASGLYPDAFAPVAQFVNWIDSIIQRSEDNPCPHPRDPDPASRTH

SEQ ID NO: 2921 - protein, 406 aa, Homo sapiens
SSCTGTAQAPRTSTCTRPSLGRTRGRRCPRPGRTGTGSSRPTPMSTSFWTSFSVLGVKQSDLPRKETEQPPAPGSMEESVRGYDWSPRDARRSPDQGRQQAERRSVLRGFCANSSLAFPTKERAFDDIPNSELSHLIVDDRHGAIYCYVPKVACTNWKRVMIVLSGSLLHRGAPYRDPLRIPREHVHNASAHLTFNKFWRRYGKLSRHLMKVKLKKYTKFLFVRDPFVRLISAFRSKFELENEEFYRKFAVPMLRLYANHTSLPASAREAFRAGLKVSFANFIQYLLDPHTEKLAPFNEHWRQVYRLCHPCQIDYDFVGKLETLDEDAAQLLQLLQVDRQSASPRATGTGPPAAGRRTGSPRSPWPGGSSCINSTRPTLFSSATPSPKTSSETESFRVAFSRVPGT

SEQ ID NO: 2922 - protein, 267 aa, Homo sapiens; identical to SEQ ID NO: 2920

SEQ ID NO: 2923 - protein, 254 aa, Homo sapiens
MAPWFALLFAASDLLFIFCFLPETLPLEKRAPSIALGFRDAADLLSPLALLRFSAVARGQDPPSGDRLSSLRRLGLVYFLYLFLFSGLEYTLSFLTHQRFQFSSLQQGKMFFLIGLTMATIQGAYARRIHPGGEVAAVKRALLLLVPAFLLIGWGRSLPVLGLGLLLYSFAAAVVVPCLSSVVAGYGSPGQKGTVMGTLRSLGALARAAGPLVAASVYWLAGAQACFTTWSGLFLLPFFLLQKLSYPAQTLKAE

SEQ ID NO: 2924 - protein, 167 aa, Homo sapiens
ALVECPSFIGGLVVFVSAAFNAQAETWFDPAFFKDDPSMVADLSRFEKGQKITPGVYRVDIVLNQTIVDTRNVNFVEITPEKGIAACLTTESLDAMGVNTDAFPAFKQLDKQACVPLAEIIPDASVTFNVNKLRLEISVPQIAIKSNARGYVPPERWDEGGPYPIPL

SEQ ID NO: 2925 - protein, 22 aa, Homo sapiens
VLSAGGVAGPAAGCPDAVPGFP

SEQ ID NO: 2926 - protein, 17 aa, Homo sapiens
MLSLSFVPMVKLLSLSS

SEQ ID NO: 2927 - protein, 13 aa, Homo sapiens
MNTGNTGIILLLF

SEQ ID NO: 2928 - protein, 56 aa, Homo sapiens
MILDSRGYLFLEVFFIACVSLSLLSVVLLYLVNRAQGGNLNYSARQREEIKFSHTE

SEQ ID NO: 2929 - protein, 123 aa, Homo sapiens
MYIYSMCVCIYVCIYTVCAYTYMYVYIQYVRIHVCIHTVCAYTCVYAYSMCVYMYVYIQYVRIHVCMYAYSMCIYMYVCIYTYVYIQSGRNHPTVFKYVMILIRGLALVWYIYGNPAIGNLTF

SEQ ID NO: 2930 - protein, 43 aa, Homo sapiens
GGGWGAAPSTPAVWFIFFLGPCLSAHLPLTHPRLCPPPGPAHP

SEQ ID NO: 2931 - protein, 80 aa, Homo sapiens
MKVSEAALSLLVLILIITSASRSQPKVPEWVNTPSTCCLKYYEKVLPRRLVVGYRKALNCHLPAIIFVTKRNREVWHQPQ

SEQ ID NO: 2932 - protein, 80 aa, Homo sapiens; identical to SEQ ID NO: 2931

SEQ ID NO: 2933 - protein, 44 aa, Homo sapiens
MMKMVLGLFFLMNLLSGKKSVRHHSKNYVKKMQTFQFPRVYKLM

SEQ ID NO: 2934 - protein, 120 aa, Homo sapiens
MKVSVAALSCLMLVTALGSQARVTKDAETEFMMSKLPLENPVLLDRFHATSADCCISYTPRSIPCSLLESYFETNSECSKPGVIFLTKKGRRFCANPSDKQVQVCMRMLKLDTRIKTRKN

SEQ ID NO: 2935 - protein, 35 aa, Homo sapiens
MIRQKLLFMLLSVRQMVLQEEFQLQRYMPILNKPI

SEQ ID NO: 2936 - protein, 91 aa, Homo sapiens [sequence omitted]

SEQ ID NO: 2937 - protein, 4 aa, Homo sapiens
FPCL

SEQ ID NO: 2938 - protein, 20 aa, Homo sapiens
MSIFLVMSISCSSTSHCYSF

SEQ ID NO: 2939 - protein, 157 aa, Homo sapiens
MVHVEPRTSFPCSPFVCVAGWLAGGICLSMCCWCAYAWGRSVGAPSPHGPRSVYAGAPKPALCPCVLALWFCLCVCVCVCVCVCVLGAVACVSLCLCGCAMVSMSLLHPCVCLGVYLSIPLLVLCPWLSLKEGGLRCSSTNKLVSHCKKKKKKTGGG

SEQ ID NO: 2940 - protein, 198 aa, Homo sapiens
MATLWGGLLRLGSLLSLSCLALSVLLLAQLSDAAKNFEDVRCKCICPPYKENSGHIYNKNISQKDCDCLHVVEPMPVRGPDVEAYCLRCECKYEERSSVTIKVTIIIYLSILGLLLLYMVYLTLVEPILKRRLFGHAQLIQSDDDIGDHQPFANAHDVLARSRSRANVLNKVEYAQQRWKLQVQEQRKSVFDRHVVLS

SEQ ID NO: 2941 - protein, 80 aa, Homo sapiens [sequence omitted]

SEQ ID NO: 2942 - protein, 47 aa, Homo sapiens
MLQFLLGFTLGNVVGMYLAQNYDIPNLAKKLEEIKKDLDAKKKPPSA

SEQ ID NO: 2943 - protein, 134 aa, Homo sapiens
MDPQTAPSRALLLLLFLHLAFLGGRSHPLGSPGSASDLETSGLQEQRNHLQGKLSELQVEQTSLEPLQESPRPTGVWKSREVATEGIRGHRKMVLYTLRAPRSPKMVQGSGCFGRKMDRISSSSGLGCKVLRRH

SEQ ID NO: 2944 - protein, 76 aa, Homo sapiens
  SITE (44): Xaa equals any amino acid
  SITE (57): Xaa equals any amino acid
  SITE (59): Xaa equals any amino acid
  SITE (60): Xaa equals any amino acid
  SITE (61): Xaa equals any amino acid
  SITE (65): Xaa equals any amino acid
  SITE (69): Xaa equals any amino acid
  SITE (73): Xaa equals any amino acid
  SITE (76): Xaa equals any amino acid
PTALHGAVKRVTNQFLKQLGLHPNWQFVDVYGMDPELLSMVPRXVCAVLLLFPITEXLXXXNRRXRKIXSQDXFSX

SEQ ID NO: 2945 - protein, 117 aa, Homo sapiens
  SITE (45): Xaa equals any amino acid
  SITE (71): Xaa equals any amino acid
LTGLLERMQTYQDAESRQVLAAWMKERQELRCITKALFNAQFGSXFRTFHNPTYFSRRLVRFSDLYMASLXCLLNYRVDFTFYPRRTPLQHEAPLWMDQLCTGCMKTPFLGDMAHIR

SEQ ID NO: 2946 - protein, 76 aa, Homo sapiens
  SITE (10): Xaa equals any amino acid
NPTTILGHFXLLPLHPTCLLLLLHTLKTSLNNEVFALSQKIYFNKPALASQGAGITGVSHHAQPFFFLFNNQFFII

SEQ ID NO: 2947 - protein, 75 aa, Homo sapiens
MKAMLQCFRFYFMRLFVFLLTSGKMIEVTLLCRAVGTNLSPIGGSPWRSGHRRWSSDPLLTSSQHLCAKIVLDLV

SEQ ID NO: 2948 - protein, 98 aa, Homo sapiens
MNQTAILICCLIFLTLSGIQGVPLSRTVRCTCISISNQPVNPRSLEKLEIIPASQFCPRVEIIATMKKKGEKRCLNPESKAIKNLLKAVSKERSKRSP

SEQ ID NO: 2949 - protein, 169 aa, Homo sapiens
MRGTPGDADGGGRAVYQSMCKPITGTINDLNQQVWTLQGQNLVAVPRSDSVTPVTVAVITCKYPEALEQGRGDPIYLGIQNPEMCLYCEKVGEQPTLQLKEQKIMDLYGQPEPVKPFLFYRAKTGRTSTLESVAFPDWFIASSKRDQPIILTSELGKSYNTAFELNIND

SEQ ID NO: 2950 - protein, 71 aa, Homo sapiens
MPGTFLRPFVFLFLFICCCLHSGGLGGVPLPPFPPQAQRGEGPGKWMSPPLPPHPVVAPPTPSPSRGCVLL

SEQ ID NO: 2951 - protein, 205 aa, Homo sapiens
MTGLALLYSGVFVAFWACALAVGVCYTIFDLGFRFDVAWFLTETSPFMWSNLGIGLAISLSVVGAAWGIYITGSSIIGGGVKAPRIKTKNLVSIIFCEAVAIYGIIMAIVISNMAEPFSATDPKAIGHRNYHAGYSMFGAGLTVGLSNLFCGVCVGIVGSGAALADAQNPSLFVKILIVEIFGSAIGLFGVIVAILQTSRVKMGD

SEQ ID NO: 2952 - protein, 158 aa, Homo sapiens [sequence omitted]

SEQ ID NO: 2953 - protein, 26 aa, Homo sapiens
MQLEQVLMLSVFNTMFSCVYAIKVQY

SEQ ID NO: 2954 - protein, 42 aa, Homo sapiens
MLVLCEMLLSPPFSFLPTTSRLATAQHSYFSPPAQLGEFRCR

SEQ ID NO: 2955 - protein, 40 aa, Homo sapiens
MRQSLLFLTSVVPFVLAPRPPDDPGFGPHQRLGKDPGELA

SEQ ID NO: 2956 - protein, 156 aa, Homo sapiens
  SITE (143): Xaa equals any amino acid
  SITE (150): Xaa equals any amino acid
MFPQCKFSREFLHPRYWLTWFGLGVLWLWVQLPYPVLCFLGTRIGAMARPFLKRRESIARKNLELCFPQHSAEEREKMIAENFRSLGMALVETGMAWFWPDSRVRKWFDVEGLDNLKRAQMQNRGVMVVGVHFMSLELGGRSXRSSKGQXYPASTL

SEQ ID NO: 2957 - protein, 196 aa, Homo sapiens [sequence omitted]

SEQ ID NO: 2958 - protein, 59 aa, Homo sapiens
MCAFVTVMLAGYFSDLFMWLLCSVTGLCAAGRVKNHCHQYYIKSNRRIRSEEGVEFSNI

SEQ ID NO: 2959 - protein, 362 aa, Homo sapiens
MTLIEGVGDEVTVLFSVLACLLVLALAWVSTHTAEGGDPLPQPSGTPTPSQPSAAMAATDSMRGEAPGAETPSLRHRGQAAQPEPSTGFTATPPAPDSPQEPLVLRLKFLNDSEQVARAWPHDTIGSLKRTQFPGREQQVRLIYQGQLLGDDTQTLGSLHLPPNCVLHCHVSTRVGPPNPPCPPGSEPRPLRAGNRQPAAAPAAPAVAAALVLPDPVPALLSPDRHSGPGRLHPAPQSPGLCHVPPVVPPRALGSVAGPSGPCSPRRGGSCCLPRPASPACLFPLPWSPALRRRGLPGLAEAPPCDRRGSGPPPGAADPQPALGVGSSGSGICCRCLGPGQSRAAPGARLSVLPEDPAASNP

SEQ ID NO: 2960 - protein, 43 aa, Homo sapiens
MTHLTPMGPKWALSCLRLWLIPGWLMCWEMGKAFLLKGSTQKA

SEQ ID NO: 2961 - protein, 135 aa, Homo sapiens
  SITE (85): Xaa equals any amino acid
  SITE (127): Xaa equals any amino acid
RCSARPNCASSCAPCTHPCAPCWNRPSRRAALSVSARARAAKPHEQVRFSVARAPALRALPAPRRRADLRRPEPLRGRRPRGAPXLSAGEGAVLARTALLPVLHVRNRVHRAGTGHPAVPLYLCASXSSPCSTQC

SEQ ID NO: 2962 - protein, 150 aa, Homo sapiens [sequence omitted]

SEQ ID NO: 2963 - protein, 28 aa, Homo sapiens
MNISTLQALLFIFALNTSAATKGILMRA

SEQ ID NO: 2964 - protein, 89 aa, Homo sapiens
MKGLAAALLVLVCTMALCSCAQVGTNKELCCLVYTSWQIPQKFIVDYSETSPQCPKPGVILLTKRGRQICADPNKKWVQKYISDLKLNA

SEQ ID NO: 2965 - protein, 26 aa, Homo sapiens
MFLWTVAGIPILFLSACFITRCVGGF

SEQ ID NO: 2966 - protein, 93 aa, Homo sapiens
MKISVAAIPFFLLITIALGTKTESSSRGPYHPSECCFTYTTYKIPRQRIMDYYETNSQCSKPGIVFITKRGHSVCTNPSDKWVQDYIKDMKEN

SEQ ID NO: 2967 - protein, 79 aa, Homo sapiens
  SITE (59): Xaa equals any amino acid
  SITE (60): Xaa equals any amino acid
  SITE (61): Xaa equals any amino acid
  SITE (62): Xaa equals any amino acid
  SITE (66): Xaa equals any amino acid
  SITE (71): Xaa equals any amino acid
  SITE (73): Xaa equals any amino acid
MDDLLPRSVCGYIFFGLIFLFCALTKLSSCLILEFYESIFLAEFRILKSSYICGPLYLXXXXFFLXGVSPXFXPGGLQG

SEQ ID NO: 2968 - protein, 41 aa, Homo sapiens
MATLQITTAMKITMMITMVMIITTIVEAMKIPTTAMMMAMQ

SEQ ID NO: 2969 - protein, 88 aa, Homo sapiens
MSRTAWLSLLSSSPFGPFSALTFLFLHLPPSTSLFINLARGQVKGPLGLILLLSFCGGYTKCDFALSYLEIPNRIEFSIKDPKRKTKC

SEQ ID NO: 2970 - protein, 426 aa, Homo sapiens
  SITE (209): Xaa equals any amino acid
MSLVLLSLAALCRSAVPREPTVQCGSETGPSPEWMLQHDLIPGDLRDLRVEPVTTSVATGDYSILMNVSWVLRADASIRLLKATKICVTGKSNFQSYSCVRCNYTEAFQTQTRPSGGKWTFSYIGFPVELNTVYFIGAHNIPNANMNEDGPSMSVNFTSPGCLDHIMKYKKKCVKAGSLWDPNITACKKNEETVEVNFTTTPLGNRYMXLIQHSTIIGFSQVFEPHQKKQTRASVVIPVTGDSEGATVQLTPYFPTCGSDCIRHKGTVVLCPQTGVPFPLDNNKSKPGGWLPLLLLSLLVATWVLVAGIYLMWRHERIKKTSFSTTTLLPPIKVLVVYPSEICFHHTICYFTEFLQNHCRSEVILEKWQKKKIAEMGPVQWLATQKKAADKVVFLLSNDVNSVCDGTCGKSEGSPSENSQDSSPCL

SEQ ID NO: 2971 - protein, 132 aa, Homo sapiens
LCAFTVLHTVIWPQGLWQTVELAWRIRLYTVLTGKTAVIRRVPVLTGDNRFTVATGTSSIRRSSDIHRTVTFRHGDAPPPQKSFGKSTINRARGGITVSLIIRRQFAAQVLAHGLANGFSIQFLAKQVMQFG

SEQ ID NO: 2972 - protein, 112 aa, Homo sapiens [sequence omitted]

SEQ ID NO: 2973 - protein, 79 aa, Homo sapiens
CKKMKTGINVLCIEMFSFIIWCLYLRVYIISPPVSCCQKKNFEFRKRNWCKVRAGHGGLMPVIPALWGAQGGWITRSGV

SEQ ID NO: 2974 - protein, 30 aa, Homo sapiens
MWPLLLWCHPAQGPQDLALLAPPPLTPHRW

SEQ ID NO: 2975 - protein, 99 aa, Homo sapiens
MDRAGRRLLLVLSGVVMVFSTSAFGAYFKLTQGGPGNSSHVAISAPVSAQPVDASVGLAWLAVGSMCLFIAGGPQALWSLLACLRFLHLQCPFHFVLCP

SEQ ID NO: 2976 - protein, 118 aa, Homo sapiens
  SITE (61): Xaa equals any amino acid
  SITE (103): Xaa equals any amino acid
  SITE (110): Xaa equals any amino acid
TEITKQELQHPREKDILFWVSSSPSTTACNWNKLHILGVLPISVLISVCLFLPLTGMSFVXSTQQFAEIQQGLWFMLPSMYKHNALKCFLKIYEFVRCLHILXLLPQFSXTKYSVALL

SEQ ID NO: 2977 - protein, 174 aa, Homo sapiens
MKAPGRLVLIILCSVVFSAVYILLCCWAGLPLCLATCLDHHFPTGSRPTVPGPLHFSGYSSVPDGKPLVREPCRSCAVVSSSGQMLGSGLGAEIDSAECVFRMNQAPTVGFEADVGQRSTLRVVSHTSVPLLLRNYSHYFQKARDTLYMVWGQGRHMDRVLGGRSRGSLEGPKL

SEQ ID NO: 2978 - protein, 31 aa, Homo sapiens
MMVKVWLEWLMLLLLPLGKMPLCARAVGEWG

SEQ ID NO: 2979 - protein, 50 aa, Homo sapiens [sequence omitted]

SEQ ID NO: 2980 - protein, 62 aa, Homo sapiens
MCHHVWLIFFLFLVEMEFHHVSQAGLKLLSSSDPPALASQSAGTTGMSHHARLLPLTFDDEV

SEQ ID NO: 2981 - protein, 87 aa, Homo sapiens [sequence omitted]

SEQ ID NO: 2982 - protein, 195 aa, Homo sapiens
MVAVCCICFFVILPLNLVGTILGRNLSGQPNFPCRVNAVPRPIPEKKWFMEPAVIVCLGGILPFGSIFIEMYFIFTSFWAYKIYYVYGFMMLVLVILCIVTVCVTIVCTYFLLNAEDYRWQWTSFLSAASTAIYVYMYSFYYYFFKTKMYGLFQTSFYFGYMAVFSTALGIMCGAIGYMGTSAFVRKIYTNVKID

SEQ ID NO: 2983 - protein, 48 aa, Homo sapiens [sequence omitted]

SEQ ID NO: 2984 - protein, 64 aa, Homo sapiens
MVQYKSSIFAIIGKSCLCLFWCQCFLLNHLLCWHLCLFTCTPHAVYICLNYSFPGKFQLYLTSS

SEQ ID NO: 2985 - protein, 21 aa, Homo sapiens
MAFRLFVSSFFSPPLSLQMCN

SEQ ID NO: 2986 - protein, 63 aa, Homo sapiens
MHYLVLGGLGVFLFFSCFVFLFFFFPLPFFPFIWREWEEVGTGRWEVDFVYFFSSFPGVGIFF

SEQ ID NO: 2987 - protein, 27 aa, Homo sapiens
MNCMSWWWMPSLASASRAMFGNRSTAS

SEQ ID NO: 2988 - protein, 42 aa, Homo sapiens
DHRGLEFCFFFFFFFFGGLGDSSQDHILASFSPTPFRKISNR

SEQ ID NO: 2989 - protein, 38 aa, Homo sapiens
MAPHGPGSLTTLVPWAAALLLALGVERALALPEVQKQV

SEQ ID NO: 2990 - protein, 60 aa, Homo sapiens
  SITE (38): Xaa equals any amino acid
MVCKNLVEDVFLMTVCCCGVMCTLYLAVLFCVCLPVCXSLFYVSKYNHITKIELNVLQLP

SEQ ID NO: 2991 - protein, 109 aa, Homo sapiens
MTDYWVLIFFNLLFTSAPPVIYGVLEKDVSAETLMQLPELYRSGQKSEAYLPHTFWITLLDAFYQSLVCFFVPYFTYQGSDTDIFAFGNPLNTAALLSFSSIWSLKARV

SEQ ID NO: 2992 - protein, 86 aa, Homo sapiens
MSLTAIFYLFIYLFLRRSLAVSPGWSSGTISPHCNLRLPGSSYSPASASQVTGTAGTCHHIQLIFVFLVETGFHLVGQDDLDLLIS

SEQ ID NO: 2993 - protein, 178 aa, Homo sapiens
MSPSGRLCLLTIVGLILPTRGQTLKDTTSSSSADSTIMDIQVPTRAPDAVYTELQPTSPTPTWPADETPQPQTQTQQLEGTDGPLVTDPETHKTTKAAHPTDDTTTLSERPSPSTDVQTDPQTLKPSGFHEDDPFFYDEHTLRKRGLLVAAVLFITGIIILTSGKCRQLSRLCRNHCR

SEQ ID NO: 2994 - protein, 52 aa, Homo sapiens
MQSTLCSPPGWVGGQGGAGAGSLLSLFVGWPGGSPDQVGETWGQRFWSGKYV

SEQ ID NO: 2995 - protein, 63 aa, Homo sapiens
ARAEAYEDIQILFYARKHKDFVEICLSSVDLPWQPAIGCFFVFRVLKSTEKMEVPSLGRKLIG

SEQ ID NO: 2996 - protein, 480 aa, Homo sapiens [sequence omitted]

SEQ ID NO: 2997 - protein, 37 aa, Homo sapiens
MFCGCLWCFVCVCVCIRECVCVACVLWNRCNNYYFRI

SEQ ID NO: 2998 - protein, 180 aa, Homo sapiens
  SITE (151): Xaa equals any amino acid
  SITE (154): Xaa equals any amino acid
  SITE (179): Xaa equals any amino acid
MVFLFFSFFLSFLLSFFLPAFLFLLRILSSPPNLTPPHPSHLPPAATAAPSPVRRVAPRFSILPMSHEIMPGGNVNITCVAVGSPMPYVKWMQGAEDLTPEDDMPVGRNVLELTDVKDSANYTCVAMSSLGVIEAVAQITVKCEQGPWGSXVEXQAGVDPRLQAQVGGNRGSTFELPSXL

SEQ ID NO: 2999 - protein, 398 aa, Homo sapiens
MRPRGLPPLLVVLLGCWASVSAQTDATPAVTTEGLNSTEAALATFGTFPSTRPPGTPRAPGPSSGPRPTPVTDVAVLCVCDLSPAQCDINCCCDPDCSSVDFSVFSACSVPVVTGDSQFCSQKAVIYSLNFTANPPQRVFELVDQINPSIFCIHITNYKPALSFINPEVPDENNFDTLMKTSDGFTLNAESYVSFTTKLDIPTAAKYEYGVPLQTSDSFLRFPSSLTSSLCTDNNPAAFLVNQAVKCTRKINLEQCEEIEALSMAFYSSPEILRVPDSRKKVPITVQSIVIQSLNKTLTRREDTDVLQPTLVNAGHFSLCVNVVLEDSCQLPGALVIEVKWTKYGSLLNPQAKIVNVTANLISSSFPENAQMHQFLNIHVKFENCTFGEIKFYIQLAK

SEQ ID NO: 3000 - protein, 182 aa, Homo sapiens
MARLLWLLRGLTLGTAPRRAVRGQAGGGGPGTGPGLGEAGSLATCELPLAKSEWQKKLTPEQFYVTREKGTEPPFSGIYLNNKEAGMYHCVCCDSPLFSSEKKYCSGTGWPSFSEAHGTSGSDESHTGILRRLDTSLGSARTEVVCKQCEAHLGHVFPDGPGPNGQRFCINSVALKFKPRKH

SEQ ID NO: 3001 - protein, 44 aa, Homo sapiens
MWVFLVVFFCFFFFFLFGYSCKIFGYRKCCVILAALIFRVDCKI

SEQ ID NO: 3002 - protein, 344 aa, Homo sapiens
MRWILFILFCLLGAPAHAVSIPGVTTTTTTDSTTEPAPEPDIEQKKAAYGALADVLDNDTSRKELIDQLRTVAATPPAEPVPKIVPPTLVEEQTVLQKVTEVSRHYGEALSARFGQLYRNITGSPHKPFNPQTFSNALTHFSMLAVLVFGFYWLIRLCALPLYRKMGQWARQKNRERSNWLQLPAMIIGAFIIDLLLLALTLFVGQVLSDNLNAGSRTIAFQQSLFLNAFALIEFFKAVLRLIFCPNVAELRPFTIQDESARYWSRRLSWLSSLIGYGLIVAVPIISNQVNVQIGALANVIIMLCMTVWALYLIFRNKKEITQHLLNFAEHSLAFFSLFICARM

SEQ ID NO: 3003 - protein, 40 aa, Homo sapiens
  SITE (19): Xaa equals any amino acid
MSHTPRLCRTPLWFILLLXFHGVQVCFLIQCYDIFQFLLS

SEQ ID NO: 3004 - protein, 43 aa, Homo sapiens
IVLLHCFLWPLVTFVVGVLIVVLTICAKSLAVKAEAMKKRKFS

SEQ ID NO: 3005 - protein, 20 aa, Homo sapiens
MIGLGFEPMSVRFLSFCYFY

SEQ ID NO: 3006 - protein, 96 aa, Homo sapiens
HKQLMNRYFICITVFCFLFFVFLRRGLTLSPRLECSGVISAHCNLRPLSSSDSPASASQVAGITGTSHCTRLIFCIFSVETGFHHLGQAGLELLTL

SEQ ID NO: 3007 - protein, 177 aa, Homo sapiens
MCLSHLENMPLSHSRTQGAQRSSWKLWLFCSIVMLLFLCSFSWLIFIFLQLETAKEPCMAKFGPLPSKWQMASSEPPCVNKVSDWKLEILQNGLYLIYGQVAPNANYNDVAPFEVRLYKNKDMIQTLTNKSKIQNVGGTYELHVGDTIDLIFNSEHQVLKNNTYWGIILLANPQFIS

SEQ ID NO: 3008 - protein, 54 aa, Homo sapiens [sequence omitted]

SEQ ID NO: 3009 - protein, 344 aa, Homo sapiens [sequence omitted]

SEQ ID NO: 3010 - protein, 378 aa, Homo sapiens
MQLRLFRRLLLAALLLVIVWTLFGPSGLGEELLSLSLASLLPAPASPGPPLALPRLLIPNQEACSGPGAPPFLLILVCTAPENLNQRNAIRASWGGLREARGLRVQTLFLLGEPNAQHPVWGSQGSDLASESAAQGDILQAAFQDSYRNLTLKTLSGLNWAEKHCPMARYVLKTDDDVYVNVPELVSELVLRGGRWGQWERSTEPQREAEQEGGQVLHSEEVPLLYLGRVHWRVNPSRTPGGRHRVSEEQWPHTWGPFPPYASGTGYVLSASAVQLILKVASRAPLLPLEDVFVGVSARRGGLAPTQCVKLAGATHYPLDRCCYGKFLLTSHRLDPWKMQEAWKLVGGSDGERTAPFCSWFQGVLGILRCRAIAWLQS

SEQ ID NO: 3011 - protein, 217 aa, Homo sapiens
MGSTVPRSASVLLLLLLLRRAEQPCGAELTFELPDNAKQCFHEEVEQGVKFSLDYQVITGGHYDVDCYVEDPQGNTIYRETKKQYDSFTYRAEVKGVYQFCFSNEFSTFSHKTVYFDFQVGDEPPILPDMGNRVTALTQMESACVTIHEALKTVIDSQTHYRLREAQDRARAEDLNSRVSYWSVGETIALFVVSFSQVLLLKSFFTEKRPISRAVHS

SEQ ID NO: 3012 - protein, 55 aa, Homo sapiens
MVSQCLVLLFCFLTLVSPHTQKYNMKPSFNLCSSSHFKCLWKKHFIESSAVNILP

SEQ ID NO: 3013 - protein, 95 aa, Homo sapiens
MLKICRGKNSTSTTMHLGIKPVQNFTHLVLWWVFFVFCFFGTESRSVAQAGVQWRNLDSLQAPPPGFTPFSCLGLPSGWDCRHPPPCPAHFLYFW

SEQ ID NO: 3014 - protein, 189 aa, Homo sapiens
MRLSLPLLLLLLGAWAIPGGLGDRAPLTATAPQLDDEEMYSAHMPAHLRCDACRAVAYQMWQNLAKAETKLHTSNSGGRRELSELVYTDVLDRSCSRNWQDYGVREVDQVKRLTGPGLSEGPEPSISVMVTGGPWPTRLSRTCLHYLGEFGEDQIYEAHQQGRGALEALLCGGPQGACSEKVSATREEL

SEQ ID NO: 3015 - protein, 139 aa, Homo sapiens
MRLSLPLLLLLLGAWAIPGGLGDRAPLTATAPQLDDEEMYSAHMPAHLRCDACRAVAYQMWQNLAKAETKLHTSNSGGRRELSELVYTDVLDRSCSRNWQDLARARAKHQRDGHRGPLAYQALQDMFALLGGVWRRPDL

SEQ ID NO: 3016 - protein, 228 aa, Homo sapiens [sequence omitted]

SEQ ID NO: 3017 - protein, 138 aa, Homo sapiens
  SITE (38): Xaa equals any amino acid
  SITE (40): Xaa equals any amino acid
MRAVLMQIFLLDPVVSRCVSPMLKVKWGSFANKFWGLXLXAMFPASPRLECSGHKISLQWPSLMQCPRPCLGQWLLCPAAWQWGPGAGPPGQCLCPVVGDITLLVLGHSMIHQPQCPLSRRPVKMSSLPGPPPAVWQP

SEQ ID NO: 3018 - protein, 9 aa, Homo sapiens
MALCGFLCY

SEQ ID NO: 3019 - protein, 123 aa, Homo sapiens
  SITE (108): Xaa equals any amino acid
AGAVTRFPPRSLGRCHGFGVGDRAVTMARLALSPVPSHWMVALLLLLSAAEPVPAARSEDRYRNPKGFSTLAQLKQRNTLKDGIIMIQTLLIILFIIVPIFLLLDKDXSKAGMEEDHTTRPGH

SEQ ID NO: 3020 - protein, 225 aa, Homo sapiens
MGLGQPQAWLLGLPTAVVYGSLALFTTILHNVFLLYYVDTFVSVYKINKMAFWVGETVFLLWNSLNDPLFGWLSDRQFLSSQPRLCGEELLVGSEEADSITLGRYLRQLARHRNFLWFVSMDLVQVWGAAPGPSTAGLDFTQGDRLLKSWELGHAWWLMPVVPALWEAEVGGSQGQEIETILVNETPSLLKIQKISRAWRRVPVVPATREAEAGEWRESGRWSLQ

SEQ ID NO: 3021 - protein, 225 aa, Homo sapiens
MQRLLLLPFLLLGTVSALHLENDAPHLESLETQADLGQDLDSSKEQERDLALTEEVIQAEGEEVKASACQDNFEDEEAMESDPAALDKDFQCPREEDIVEVQGSPRCKTCRYLLVRTPKTFAEAQNVCSRCYGGNLVSIHDFNFNYRIQCCTSTVNQAQVWIGGNLRGWFLWKRFCWTDGSHWNFAYWSPGQPGNGQGSCVALCTKGGYWRRAQCDKQLPFVCSF

SEQ ID NO: 3022 - protein, 43 aa, Homo sapiens
MICLILLLQAVVFLRSLHVVHNFQILDLSGTSYPKFYQTLHRQ

SEQ ID NO: 3023 - protein, 81 aa, Homo sapiens
MSKRSASFILLPLLFLKGSFAKLNARISDCLEERYCHNLWMVFQGCVITELHLSRMSKTLSSLCYDFVINVYIFFKFLDIT

SEQ ID NO: 3024 - protein, 101 aa, Homo sapiens
MSSAAGFCASRPGLLFLGLLLLPLVVAFASAEAEEDGDLQCLCVKTTSQVRPRHITSLEVIKAGPHCPTAQLIATLKNGRKICLDLQAPLYKKIIKKLLES

SEQ ID NO: 3025 - protein, 125 aa, Homo sapiens [sequence omitted]

SEQ ID NO: 3026 - protein, 235 aa, Homo sapiens
MPWVLLLLTLLTHSAVSVVQAGLTQPPSVSKDLRQTATLTCTGNNNNVGDQGAAWLQQHQGHPPKLLSYRNNNRPSGISERLSASRSGATSSLTITGLQPEDEADYYCAAYDSSLAVWMFGGGTKLTVLGQPKAAPSVTLFPPSSEELQANKATLVCLISDFYPGAVTVAWKADSSPVKAGVETTTPSKQSNNKYAASSYLSLTPEQWKSHKSYSCQVTHEGSTVEKTVAPTECS

SEQ ID NO: 3027 - protein, 189 aa, Homo sapiens; identical to SEQ ID NO: 3014

SEQ ID NO: 3028 - protein, 128 aa, Homo sapiens
MSLRLDTTPSCNSARPLHALQVLLLLSLLLTALASSTKGQTKRNLAKGKEESLDSDLYAELRCMCIKTTSGIHPKNIQSLEVIGKGTHCNQVEVIATLKDGRKICLDPDAPRIKKIVQKKLAGDESAD

SEQ ID NO: 3029 - protein, 8 aa, Homo sapiens
MGHCPHSY

SEQ ID NO: 3030 - protein, 147 aa, Homo sapiens
MSQTRDLQGGKAFGLLKAQQEERLDEINKQFLDDPKYSSDEDLPSKLEGFKEKYMEFDLNGNGDIDIMSLKRMLEKLGVPKTHLELKKLIGEVSSGSGETFSYPDFLRMMLGKRSAILKMILMYEEKAREKEKPTGPPAKKAISELP

SEQ ID NO: 3031 - protein, 29 aa, Homo sapiens
EYIHSLWRWLCSLVLAPSYMVARSFIAKL

SEQ ID NO: 3032 - protein, 55 aa, Homo sapiens
  SITE (4): Xaa equals any amino acid
SDRXREFPGRTHASAFLMGCGGIVLSLCPKITCIKTPEVLCGCVRVSVCLYTSGN

SEQ ID NO: 3033 - protein, 8 aa, Homo sapiens
MKGWWFWV

SEQ ID NO: 3034 - protein, 78 aa, Homo sapiens [sequence omitted]

SEQ ID NO: 3035 - protein, 44 aa, Homo sapiens [sequence omitted]

SEQ ID NO: 3036 - protein, 397 aa, Homo sapiens
  SITE (392): Xaa equals any amino acid
MQKVLLPVCKIETGVCRLSSGLLLLCRCSACPHGVPGSDQETAGSGGSGSQGQSDGDADQEGCRGSPAAAQLPRVTDLRGRWGCQGAGGAGRGLRSLGLRGEVSRFLSPGRSVGGYAPVTPCPNLIVLGCHLDNVLLPGVGICDGVCCAVGQLHMLPLVQDEGSVAQKELERKRLRVRPGRGGLPRHLQPARVAGHWPGYHIFWRIRLHNGELVKGDSCGIVAQGIADTYGDLVLDGGEQVHVANVAAVLEGWVLLTDHNFGAMQHSHIEGVGNVGGGGQMPAAVEALGVSVGAAAEHRLPRRQAHMQQDLVAQVPGVTVEAGVEATVAQFQAMEHQLRAVEQVRGQVCPIYPPRHRSIPVCCPTWQCHVRAQALVLHMGCLLWTFVPESCXPGGIH

SEQ ID NO: 3037 - protein, 45 aa, Homo sapiens
AQKGAWLWILLGSSSTEAHWPLTQHTPGEVCRPSGDRTAKSLDSR

SEQ ID NO: 3038 - protein, 26 aa, Homo sapiens
MPWFLLLFPRWITIFWLFCLSWCSEA

SEQ ID NO: 3039 - protein, 107 aa, Homo sapiens
MTCNRHFLFVFCFTVLFCFLRLSLALLPRLECNGVISAHCNLRLPRSSDSPASASWVAGITGTCHHAWLIFVFVVETGVSPCWSGWSRTPEIVIHLPRPPKVLGLQA

SEQ ID NO: 3040 - protein, 134 aa, Homo sapiens [sequence omitted]

SEQ ID NO: 3041 - protein, 64 aa, Homo sapiens
  SITE (11): Xaa equals any amino acid
MSESLHLASSXFFVVVVVVFLNNPTLVQMKSGATAGILDPGCLRSIPSFHMLPVDMVSNLTSPV

SEQ ID NO: 3042 - protein, 89 aa, Homo sapiens
MFGTWQGRQGDGGALGTVWLTSLCLTWRAWSSCQVPGPMSPTRSRLCARLSSRSWSRPARGSGSSIRSWLRCSCRVRRPVGRPMGSRVS

SEQ ID NO: 3043 - protein, 151 aa, Homo sapiens
MRRLLLVTSLVVVLLWEAGAVPAPKVPIKMQVKHWPSEQDPEKAWGARVVEPPEKDDQLVVLFPVQKPKLLTTEEKPRGQGRGPILPGTKAWMETEDTLGRVLSPEPDHDSLYHPPPEEDQGEERPRLWVMPNHQVLLGPEEDQDHIYHPQ

SEQ ID NO: 3044 - protein, 107 aa, Homo sapiens
  SITE (58): Xaa equals any amino acid
  SITE (69): Xaa equals any amino acid
  SITE (102): Xaa equals any amino acid
  SITE (104): Xaa equals any amino acid
MAHLFSPLWLAVPLQSNHLVAGSIHLPQLCPCRGRGGKSKLPETQGKEDEGPGDELGXTRLPFLCRCEXSGAESSKGAGMKMDLMGSWTLPSHPGPSVSFPXSXQLL

SEQ ID NO: 3045 - protein, 73 aa, Homo sapiens
MSTFKSLTPNPHAVCISFAYLFLCFSLSSALCLNWQDRFIGLILGQAELQMKKTCIFSILPKGQSDNGYVLCN

SEQ ID NO: 3046 - protein, 186 aa, Homo sapiens
  SITE (158): Xaa equals any amino acid
  SITE (159): Xaa equals any amino acid
MSLLLLVVSALHILILILLFVATLDKSWWTLPGKESLNLWYDCTWNNDTKTWACSNVSENGWLKAVQVLMVLSLILCCLSFILFMFQLYTMRRGGLFYATGLCQLCTSVAVFTGALIYAIHAEEILEKHPRGGSFGYCFALAWVAFPLALVSGIIYIXXGSGSERPASLGCPRPFPAPLAARPPKK

SEQ ID NO: 3047 - protein, 398 aa, Homo sapiens
MGAPAASLLLLLLLFACCWAPGGANLSQDDSQPWTSDETVVAGGTVVLKCQVKDHEDSSLQWSNPAQQTLYFGEKRALRDNRIQLVTSTPHELSISISNVALADEGEYTCSIFTMPVRTAKSLVTVLGIPQKPIITGYKSSLREKDTATLNCQSSGSKPAARLTWRKGDQELHGEPTRIQEDPNGKTFTVSSSVTFQVTREDDGASIVCSVNHESLKGADRSTSQRIEVLYTPTAMIRPDPPHPREGQKLLLHCEGRGNPVPQQYLWEKEGSVPPLKMTQESALIFPFLNKSDSGTYGCTATSNMGSYKAYYTLNVNDPSPVPSSSSTYHAIIGGIVAFIVFLLLIMLIFLGHYLIRHKGTYLTHEAKGSDDAPDADTAIINAEGGQSGGDDKKEYFI

SEQ ID NO: 3048 - protein, 59 aa, Homo sapiens
MLPAWCWLSICLAGRADAQLCPCQDSRGEPATQQAGEATLPPLPPDRLLSADPGGLPGL

SEQ ID NO: 3049 - protein, 912 aa, Homo sapiens
MPGKRGLGWWWARLPLCLLLSLYGPWMPSSLGKPKGHPHMNSIRIDGDITLGGLFPVHGRGSEGKPCGELKKEKGIHRLEAMLFALDRINNDPDLLPNITLGARILDTCSRDTHALEQSLTFVQALIEKDGTEVRCGSGGPPIITKPERVVGVIGASGSSVSIMVANILRLFKIPQISYASTAPDLSDNSRYDFFSRVVPSDTYQAQAMVDIVRALKWNYVSTVASEGSYGESGVEAFIQKSREDGGVCIAQSVKIPREPKAGEFDKIIRRLLETSNARAVIIFANEDDIRRVLEAARRANQTGHFFWMGSDSWGSKIAPVLHLEEVAEGAVTILPKRMSVRGFDRYFSSRTLDNNRRNIWFAEFWEDNFHCKLSRHALKKGSHVKKCTNRERIGQDSAYEQEGKVQFVIDAVYAMGHALHAMHRDLCPGRVGLCPRMDPVDGTQLLKYIRNVNFSGIAGNPVTFNENGDAPGRYDIYQYQLRNDSAEYKVIGSWTDHLHLRIERMHWPGSGQQLPRSICSLPCQPGERKKTVKGMPCCWHCEPCTGYQYQVDRYTCKTCPYDMRPTENRTGCRPIPIIKLEWGSPWAVLPLFLAVVGIAATLFVVITFVRYNDTPIVKASGRELSYVLLAGIFLCYATTFLMIAEPDLGTCSLRRIFLGLGMSISYAALLTKTNRIYRIFEQGKRSVSAPRFISPASQLAITFSLISLQLLGICVWFVVDPSHSVVDFQDQRTLDPRFARGVLKCDISDLSLICLLGYSMLLMVTCTVYAIKTRGVPETFNEAKPIGFTMYTTCIVWLAFIPIFFGTSQSADKLYIQTTTLTVSVSLSASVSLGMLYMPKVYIILFHPEQNVPKRKRSLKAVVTAATMSNKFTQKGNFRPNGEAKSELCENLEAPALATKQTYVTYTNHAI

SEQ ID NO: 3050 - protein, 45 aa, Homo sapiens
MKSSMWKLNMVVLFITKKVVAWFVPKMKKQTMIIMKFYSIWRNLS

SEQ ID NO: 3051 - protein, 32 aa, Homo sapiens
MRLLGWWQVLLWVLGLPVRGVEGPYGFSEPKR

SEQ ID NO: 3052 - protein, 188 aa, Homo sapiens
MVPGAAGWCCLVLWLPACVAAHGFRIHDYLYFQVLSPGDIRYIFTATPAKDFGGIFHTRYEQIHLVPAEPPEACGELSNGFFIQDQIALVERGGCSFLSKTRVVQEHGGRAVIISDNAVDNDSFYVEMIQDSTQRTADIPALFLLGRDGYMIRRSLEQHGLPWAIISIPVNVTSIPTFELLQPPWTFW

SEQ ID NO: 3053 - protein, 429 aa, Homo sapiens
PKGLVPAVLWGLSLFLNLPGPIWLQPSPPPQSSPPPQPHPCHTCRGLVDSFNKGLERTIRDNFGGGNTAWEEENLSKYKDSETRLVEVLEGVCSKSDFECHRLLELSEELVESWWFHKQQEAPDLFQWLCSDSLKLCCPAGTFGPSCLPCPGGTERPCGGYGQCEGEGTRGGSGHCDCQAGYGGEACGQCGLGYFEAERNASHLVCSACFGPCARCSGPEESNCLQCKKGWALHHLKCVDIDECGTEGANCGADQFCVNTEGSYECRDCAKACLGCMGAGPGRCKKCSPGYQQVGSKCLDVDECETEVCPGENKQCENTEGGYRCICAEGYKQMEGICVKEQIPGAFPILTDLTPETTRRWKLGSHPHSTYVKMKMQRDEATFPGLYGKQVAKLGSQSRQSDRGTRLIHVINALPPTCPPQKKKKKKKK

SEQ ID NO: 3054 - protein, 205 aa, Homo sapiens
MLGAKPHWLPGPLHSPGLPLVLVLLALGAGWAQEGSEPVLLEGECLVVCEPGRAAAGGPGGAALGEAPPGRVAFAAVRSHHHEPAGETGNGTSGAIYFDQVLVNEGGGFDRASGSFVAPVRGVYSFRFHVVKVYNRQTVQVSLMLNTWPVISAFANDPDVTREAATSSVLLPLDPGDRVSLRLRRGNLLGGWKYSSFSGFLIFPL

SEQ ID NO: 3055 - protein, 120 aa, Homo sapiens
  SITE (48): Xaa equals any amino acid
AKELSRPFPKTPPKWPRADKKVSCLWHQGSASYYKTKTKESNGFNCLXVTDFLLNCTLAKECDLYYLPTYHIFIHYIIICELLTFALGPSTSSIFKRFHACLRMFSLMGISRPFFHILHQ

SEQ ID NO: 3056 - protein, 27 aa, Homo sapiens
RLECSCPITAHCSLKLLGSSDPPILAS

SEQ ID NO: 3057 - protein, 122 aa, Homo sapiens
MYTTCIVWLAFIPIFFGTSQSADKLYIQTTTLTVSVSLSASVSLGMLYMPKVYIILFHPEQNVPKRKRSLKAVVTVATMSNKFTQKGNFRPNGEAKSELCENLEAPALATKQTYVTYTNHAI

SEQ ID NO: 3058 - protein, 129 aa, Homo sapiens
  SITE (41): Xaa equals any amino acid
  SITE (99): Xaa equals any amino acid
MPKAFATAGWLVSLVLLVFLGFMSFVTTTFVIEAMAAANAXFHWKRMENLKEEEDDDSSTASDSDVLIRDNYERAEKRPILSVRKSWGSRGPALPSGPXGFPFFMERALERLPADSGISCPWVLRQALW

SEQ ID NO: 3059 - protein, 64 aa, Homo sapiens
MAVTLSLLLGGRVCAAVTRCGFATRGVAGPGPIGREPDPDSDWEPEERELQEVERYRLLPGPSA

SEQ ID NO: 3060 - protein, 30 aa, Homo sapiens
PFANSVLEVILYDITTTNKRNQLYAFRKQT

SEQ ID NO: 3061 - protein, 333 aa, Homo sapiens
  SITE (239): Xaa equals any amino acid
  SITE (314): Xaa equals any amino acid
  SITE (315): Xaa equals any amino acid
  SITE (322): Xaa equals any amino acid
  SITE (332): Xaa equals any amino acid
  SITE (333): Xaa equals any amino acid
MLFSRGLVKVLFATETFAMGVNMPARTVVFDSMRKHDGSTFRDLLPGEYVQMAGRAGRRGLDPTGTVILLCKGRVPEMADLHRMMMGKPSQLQSQFRLTYTMILNLLRVDALRVEDMMKRSFSEFPSRKDSKAHEQALAELTKRLGALEEPDMTGQLVDLPEYYSWGEELTETQHMIQRRIMESVNGLKSLSAGRVVVVKNQEHHNALGVILQVSSNSTSRVFTTLVLCDKPLSQDPQXRGPATAEVPYPDDLVGFKLFLPEGPCDHTVVKLQPGDMAAITTKVLRVNGEKILEDFSKRQQPKFKSEMLGRPFXXRGARRGXGGAVVWEFPXX

SEQ ID NO: 3062 - protein, 27 aa, Homo sapiens
MFFLLISMVSFLFFLIFNVPTPLRLDI

SEQ ID NO: 3063 - protein, 263 aa, Homo sapiens
MLLAWVQAFLVSNMLLAEAYGSGGCFWDNGHLYREDQTSPAPGLRCLNWLDAQSGLASAPVSGAGNHSYCRNPDEDPRGPWCYVSGEAGVPEKRPCEDLRCPETTSQALPAFTTEIQEASEGPGADEVQVFAPANALPARSEAAAVQPAIGISQRVRMNSKEKKDLGTLGYVLGITMMVIIIAIGAGIILGYSYKRGKDLKEQHDQKVCEREMQRITLPLSAFTNPTCEIVDEKTVVVHTSQTPVDPQEGSTPLMGQAGTPGA

SEQ ID NO: 3064 - protein, 197 aa, Homo sapiens
MPSVLLVAMSWVSFWISQAAVPARVSLGITTVLTMTTLMVSARSSLPRASAIKALDVYFWICYVFVFAALVEYAFAHFNADYRKKQKAKVKVSRPRAEMDVRNAIVLFSLSAAGVTQELAISRRQRRVPGNLMGSYRSVGVETGETKKEGAARSGGQGGIRARLRPIDADTIDIYARAVFPAAFAAVNVIYWAAYAM

SEQ ID NO: 3065 - protein, 685 aa, Homo sapiens
MWLKLFFLLLYFLVLFVLARFFEAIVWYETGIFATQLVDPVALSFKKLKTILECRGLGYSGLPEKKDVRELVEKSGDLMEGELYSALKEEEASESVSSTNFSGEMHFYELVEDTKDGIWLVQVIANDRSPLVGKIHWEKMVKKVSRFGIRTGTFNCSSDPRYCRRRGWVRSTLIMSVPQTSTSKGKVMLKEYSGRKIEVEHIFKWITAHAASRIKTIYNAEHLKEEWNKSDQYWLKIYLFANLDQPPAFFSALSIKFTGRVEFIFVNVENWDNKSYMTDIGIYNMPSYILRTPEGIYRYGNHTGEFISLQAMDSFLRSLQPEVNDLFVLSLVLVNLMAWMDLFITQGATIKRFVVLISTLGTYNSLLIISWLPVLGFLQLPYLDSFYEYSLKLLRYSNTTTLASWVRADWMFYSSHPALFLSTYLGHGLLIDYFEKKRRRNNNNDEVNANNLEWLSSLWDWYTSYLFHPIASFQNFPVESDWDEDPDLFLERLAFPDLWLHPLIPTDYIKNLPMWRFKCLGVQSEEEMSEGSQDTENDSESENTDTLSSEKEVFEDKQSVLHNSPGTASHCDAEACSCANKYCQTSPCERKGRSYGSYNTNEDMEPDWLTWPADMLHCTECVVCLENFENGCLLMGLPCGHVFHQNCIVMWLAGGRHCCPVCRWPSYKKKQPYAQHQPLSNDVPS

SEQ ID NO: 3066 - protein, 124 aa, Homo sapiens
MFVYIVFLFGFSTAVVTLIEDGKNDSLPSESTSHRWRGPACRPPDSSYNSLYSTCLELFKFTIGMGDLEFTENYDFKAVFIILLLAYVILTYILLLNMLIALMGETVNKIAQESKNIWKLQRAI

SEQ ID NO: 3067 - protein, 508 aa, Homo sapiens [sequence omitted]

SEQ ID NO: 3068 - protein, 574 aa, Homo sapiens
MPLALLVLLLLGPGGWCLAEPPRDSLREELVITPLPSGDVAATFQFRTRWDSELQREGVSHYRLFPKALGQLISKYSLRELHLSFTQGFWRTRYWGPPFLQAPSGAELWVWFQDTVTDVDKSWKELSNVLSGIFCASLNFIDSTNTVTPTASFKPLGLANDTDHYFLRYAVLPREVVCTENLTPWKKLLPCSSKAGLSVLLKADRLFHTSYHSQAVHIRPVCRNARCTSISWELRQTLSVVFDAFITGQGKKDWSLFRMFSRTLTEPCPLASESRVYVDITTYNQDNETLEVHPPPTTTYQDVILGTRKTYAIYDLLDTAMINNSRNLNIQLKWKRPPENEAPPVPFLHAQRYVSGYGLQKGELSTLLYNTHPYRAFPVLLLDTVPWYLRLYVHTLTITSKGKENKPSYIHYQPAQDRLQPHLLEMLIQLPANSVTKVSIQFERALLKWTEYTPDPNHGFYVSPSVLSALVPSMVAAKPVDWEESPLFNSLFPVSDGSNYFVRLYTEPLLVNLPTPDFSMPYNVICLTCTVVAVCYGSFYNLLTRTFHIEEPRTGGLAKRLANLIRRARGVPPL

SEQ ID NO: 3069 - protein, 147 aa, Homo sapiens
MLWLFQSLLFVFCFGPGNVVSQSSLTPLMVNGILGESVTLPLEFPAGEKVNFITWLFNETSLAFIVPHETKSPEIHVTNPKQGKRLNFTQSYSLQLSNLKMGRHRLLQSPDIHKDLCKAVQLHFEDIKTTEEHTSYQSQSAISEYDL

SEQ ID NO: 3070 - protein, 20 aa, Homo sapiens
  SITE (4): Xaa equals any amino acid
QRIXFLMVFVLLIECADIEF

SEQ ID NO: 3071 - protein, 41 aa, Homo sapiens
MPGPRLPFLLVELLAFPRASFQPSYLCLQPDIPGCSLLEKK

SEQ ID NO: 3072 - protein, 212 aa, Homo sapiens
  SITE (201): Xaa equals any amino acid
  SITE (202): Xaa equals any amino acid
  SITE (203): Xaa equals any amino acid
MKQLFSILEELAMVTSLRPPVQANPDLLSLLTVSLDQYQTEDELYQLSLQREPRSKSSPTSPTSCTPPPRPPVLEEWTSAAKPKLDQALVVEHIEKMVESVFRNFDVDGDGHISQEEFQIIRGNFPYLSAFGDLDQNQDGCISREEMVSYFLRSSSVLGGRMGFVHNFQESNSLRPVACRHCKALILGIYKQGSNAEPVEXXXTSSARIACQ

SEQ ID NO: 3073 - protein, 37 aa, Homo sapiens
MKKLAKVSHMTSDRRQWCAIAILFAVLLVVLILFLVL

SEQ ID NO: 3074 - protein, 90 aa, Homo sapiens
MALRHLALLAGLLVGVASKSMENTAQLPECCVDVVGVNASCPGASLCGPGCYRRWNADGSATASAVGTEPSQPTTAPSVEALLARVRHSP

SEQ ID NO: 3075 - protein, 71 aa, Homo sapiens
MLPAVPLVCCCLVVWAKVPRQEILLLGQYSAIGSLGPLGGTRVDQTDSIFLSSRKRKEIGVARAGNGYARL

SEQ ID NO: 3076 - protein, 336 aa, Homo sapiens
MHIQKSLPLLEGQIRESHQKATEELRRCGADIPSQEADKMFFLIEKIKMFNQDIEKLVEGEEVVRENETRLYNKIREDFKNWVGILATNTQKVKNIIHEEVEKYEKQYRGKELLGFVNYKTFEIIVHQYIQQLVEPALSMLQKAMEIIQQAFINVAKKHFGEFFNLNQTVQSTIEDIKVKHTAKAENMIQLQFRMEQMVFCQDQIYSVVLKKVREEIFNPLGTPSQNMKLNSHFPSNESSVSSFTEIGIHLNAYFLETSKRLANQIPFIIQYFMLRENGDSLQKAMMQILQEKNRYSWLLQEQSETATKRRILKERIYRLTQARHALCQFSSKEIH

SEQ ID NO: 3077 - protein, 79 aa, Homo sapiens
MAWCALQLAVVVVVLVVVVVVGSPFVCPLDVVLAVVACAQAGSRAGGARRGVDDLGGRVLLLAWGTRAAEQRAPQQLQR

SEQ ID NO: 3078 - protein, 108 aa, Homo sapiens
MAAAMPLALLVLLLLGPGGWCLAEPPRDSLREELVITPLPSASGHGGGYAACSARPVAPGARRLVPCRTPTRQPAGGTCHHPAAFRGRSRHIPVPHALGFGASAGRRH

SEQ ID NO: 3079 - protein, 167 aa, Homo sapiens
MLTVALLALLCASASGNAIQARSSSYSGEYGGGGGKRFSHSGNQLDGPITALRVRVNTYYIVGLQVRYGKVWSDYVGGRNGDLEEIFLHPGESVIQVSGKYKWYLKKLVFVTDKGRYLSFGKDSGTSFNAVPLHPNTVLRFISGRSGSLIDAIGLHWDVYPTSCSRC

SEQ ID NO: 3080 - protein, 167 aa, Homo sapiens; identical to SEQ ID NO: 3079

SEQ ID NO: 3081 - protein, 69 aa, Homo sapiens
  SITE (64): Xaa equals any amino acid
MACGRTLYFWSTCCVVVPSSSQWCGQSDIYKKHQQQMEKPFCISLTFQSCLLNQKKSCKENVLXGSGLI

SEQ ID NO: 3082 - protein, 3 aa, Homo sapiens
LYL

SEQ ID NO: 3083 - protein, 235 aa, Homo sapiens
MDMRVPAQLLGLLLLWLRGARCDMQMTQSPSSLSASVGDRVTITCRTSQSIGKFLNWYQQKPGQAPKLLISGASILQTGVPSRFSGSGSATYFTLTINDLHPEDSATYYCQQDYTTPLFGQGTKVEIKRTVAAPSVFIFPPSDEQLKSGTASVVCLLNNFYPREAKVQWKVDNALQSGNSQESVTEQDSKDSTYSLSSTLTLSKADYEKHKVYACEVTHQGLSSPVTKSFNRGEC

SEQ ID NO: 3084 - protein, 186 aa, Homo sapiens
MSGLSRPLLLAVGCLAALCVITAAGNTTLAPNVTTASSPPPTTTTVPVSPTTLSPLPVTTPAPDICGSRNSCVSCVDGNATCFWIECKGKSYCSDNSTAGDCKVVNTTGFCSAKTTTLPSTTTTSTTATTSGTTNTTLSPTIQPTRKSTFDAASFIGGIVLVLGVQAVIFFLYKFCKSKERNYHTL

SEQ ID NO: 3085 - protein, 175 aa, Homo sapiens
MEKIPVSAFLLLVALSYTLARDTTVKPGAKKDTKDSRPKLPQTLSRGWGDQLIWTQTYEEALYKSKTSNKPLMIIHHLDECPHSQALKKVFAENKEIQKLAEQFVLLNLVYETTDKHLSPDGQYVPRIMFVDPSLTVRADITGRYSNRLYAYEPADTALLLDNMKKALKLLKTEL

SEQ ID NO: 3086 - protein, 153 aa, Homo sapiens
MRLLLLLSCLAKTGVLGDIIMRPSCAPGWFYHKSNCYGYFRKLRNWSDAELECQSYGNGAHLASILSLKEASTIAEYISGYQRSQPIWIGLHDPQKRQQWQWIDGAMYLYRSWSGKSMGGNKHCAEMSSNNNFLTWSSNECNKRQHFLCKYRP

SEQ ID NO: 3087 - protein, 104 aa, Homo sapiens
MPRHSLYIIIGALCVAFILMLIILIVGICRISRIEYQGSSRPAYKEFYNCRSIDSEFSNAIASIRHARFGKKSRPAMYDVSPIAYEDYSPDDKPLVTLIKTKDL

SEQ ID NO: 3088 - protein, 81 aa, Homo sapiens
MSLASLLFVVMFIPETKGCSLEQISMELAKVNYVKNNICFMSHHQEELVPKQPQKRKPQEQLLECNKLCGRGQSRQLSPET

SEQ ID NO: 3089 - protein, 188 aa, Homo sapiens
MEGAPPGSLALRLLLFVALPASGWLTTGAPEPPPLSGAPQDGIRINVTTLKDDGDISKQQVVLNITYESGQVYVNDLPVNSGVTRISCQTLIVKNENLENLEEKEYFGIVSVRILVHEWPMTSGSSLQLIVIQEEVVEIDGKQVQQKDVTEIDILVKNRGVLRHSNYTLPLEESMLYSISRGGARYPI

SEQ ID NO: 3090 - protein, 58 aa, Homo sapiens
MWFYFLSVSFPLLPVLAPAPPPAPTTLCLLLFLGLLYNSTCIHCVHTTSQTKTQRQTL

SEQ ID NO: 3091 - protein, 53 aa, Homo sapiens
RADDVPTILKLQHTNSVNNNSYSLHTAHWNGFLNLASSLMQLMKQTLTAFLHL

SEQ ID NO: 3092 - protein, 114 aa, Homo sapiens
  SITE (64): Xaa equals any amino acid
  SITE (65): Xaa equals any amino acid
  SITE (66): Xaa equals any amino acid
NSARARLEFSGTILVHCSLNLLVSSNPPTSASQVAETAGTCHHAQLIFVFFVAMGSHYVACSDXXXTPGLKQSSCLCLPKCWGYRHEPQCLAHKCILKGNFKTPLHMENDNLFS

SEQ ID NO: 3093 - protein, 89 aa, Homo sapiens
MSCARHCSCFVLFCFFETESCSVAQAGVQWRSLSSLQPPPPGFKRFPCLGLPSSWDYRCTPPRPAGFGIFSRDGFLPCWPGWSRSLDLR

SEQ ID NO: 3094 - protein, 86 aa, Homo sapiens
MGWARWLMPVFPALWEAEAGGSLELRSSRPVWATWWDSPPLPKIQKKKKKKKKNRISLAWWRSPVVSATQEAEVGGSLEPGRRRLQ

SEQ ID NO: 3095 - protein, 34 aa, Homo sapiens
MLSSFPSYLLLPLLLRQSFVVSSRLECIGAHSSL

SEQ ID NO: 3096 - protein, 87 aa, Homo sapiens
MKMISFFSVMAVMTITTSSACYHPFLKSPEASGGAQNVSWRSVNSLLKLLDLNRLPRSTVCRVLVKWLIPSSPTTSTCLYIWCLQNL

SEQ ID NO: 3097 - protein, 126 aa, Homo sapiens
MRWSFFGLVSLMGFFAAVPPASADEDYAVLIISRERLEVPTNCEIGLYIQDQLAGRLFQEQATSFNLPAGNVSLRLKLLPGQSQGCLPGMLAPPAQNITLKAGDVRKLRIAQGPDGMYLKPAALEY

SEQ ID NO: 3098 - protein, 59 aa, Homo sapiens
MSHRARPASIISYQIFCVLFFLLAAIALLSRLLHLIDYCHSHVNFPSPHMLTSFFFFFF

SEQ ID NO: 3099 - protein, 361 aa, Homo sapiens
MFTWSGLACLIFLNCTLNWPIEAFPAPEEVNYTKKIKLSGLALDHKVTGDLFYTHVTTMGQRLSQKAPSLEDGSDAFMSPQDVRGTSENLPERSVPLRKSLCSPTFLWSLLTMGMTQLRIIFYMAAVNKMLEYLVTGGQEHETNEQQQKVAETVGFYSSVFGAMQLLCLLTCPLIGYIMDWRIKDCVDAPTQGTVLGDARDGVATKSIRPRYCKIQKLTNAISAFTLTNLLLVGFGITCLINNLHLQFVTFVLHTIVRGFFHSACGSLYAAVFPSNHFGTLTGLQSLISAVFALLQQPLFMAMVGPLKGEPFWVNLGLLLFSLLGFLLPSYLFYYRARLQQEYAANGMGPLKVLSGSEVTA

SEQ ID NO: 3100 - protein, 85 aa, Homo sapiens [sequence omitted]

SEQ ID NO: 3101 - protein, 423 aa, Homo sapiens
  SITE (92): Xaa equals any amino acid
MLPPQKKPWESMAKGLVLGALFTSFLLLVYSYAVPPLHAGLASTTPEAAASCSPPALEPEAVIRANGSAGECQPRRNIVFLKTHKTASSTLXNILFRFGQKHRLKFAFPNGRNDFDYPTFFARSLVQDYRPGACFNIICNHMRFHYDEVRGLVPTNAIFITVLRDPARLFESSFHYFGPVVPLTWKLSAGDKLTEFLQDPDRYYDPNGFNAHYLRNLLFFDLGYDNSLDPSSPQVQEHILEVERRFHLVLLQEYFDESLVLLKDLLCWELEDVLYFKLNARRDSPVPRLSGELYGRATAWNMLDSHLYRHFNASFWRKVEAFGRERMAREVAALRHANERMRTICIDGGHAVDAAAIQDEAMQPWQPLGTKSILGYNLKKSIGQRHAQLCRRMLTPEIQYLMDLGANLWVTKLWKFIRDFLRW

SEQ ID NO: 3102 - protein, 50 aa, Homo sapiens
MTGFLTRRTHLSLNLTFLFVLLTPLPRSLQRRSSELEKFYEMPFSLEHLT

SEQ ID NO: 3103 - protein, 184 aa, Homo sapiens
  SITE (38): Xaa equals any amino acid
  SITE (50): Xaa equals any amino acid
  SITE (166): Xaa equals any amino acid
  SITE (172): Xaa equals any amino acid
  SITE (176): Xaa equals any amino acid
  SITE (182): Xaa equals any amino acid
MSQLKFLGLSTTHLEKSSVLPIAHLNISKVLLVLGETXGEKEDPEGLQDXNTESLHIVFPTNKEFHFILDVSVKTVANLELSNIKCVLEDNKCSYFLSILAKLQTNPKLSNLTLNNIETTWNSFIRILQLVWHTTVWNFSISNVKLQGQLDFRDFDYSGTSLKALXIHQVVXRMGXGFFRQXVI

SEQ ID NO: 3104 - protein, 192 aa, Homo sapiens [sequence omitted]

SEQ ID NO: 3105 - protein, 672 aa, Homo sapiens
MQKASVLLFLAWVCFLFYAGIALFTSGFLLTRLELTNHSSCQEPPGPGSLPWGSQGKPGACWMASRFSRVVLVLIDALRFDFAQPQHSHVPREPPVSLPFLGKLSSLQRILEIQPHHARLYRSQVDPPTTTMQRLKALTTGSLPTFIDAGSNFASHAIVEDNLIKQLTSAGRRVVFMGDDTWKDLFPGAFSKAFFFPSFNVRDLDTVDNGILEHLYPTMDSGEWDVLIAHFLGVDHCGHKHGPHHPEMAKKLSQMDQVIQGLVERLENDTLLVVAGDHGMTTNGDHGGDSELEVSAALFLYSPTAVFPSTPPEEPEVIPQVSLVPTLALLLGLPIPFGNIGEVMAELFSGGEDSQPHSSALAQASALHLNAQQVSRFLHTYSAATQDLQAKELHQLQNLFSKASADYQWLLQSPKGAEATLPTVIAELQQFLRGARAMCIESWARFSLSFLLLHLLAAGIPVTTPGPFTVPWQAVSAWALMATQTFYSTGHQPVFPAIHWHAAFVGFPEGHGSCTWLPALLVGANTFASHLLFAVGCPLLLLWPFLCESQGLRKRQQPPGNEADARVRPEEEEEPLMEMRLRDAPQHFYAALLQLGLKYLFILGIQILACALAASILRRHLMVWKVFAPKFIFEAVGFIVSSVGLLLGIALVMRVDGAVSSWFRQLFLAQQR

SEQ ID NO: 3106 - protein, 357 aa, Homo sapiens
MQSVQSTSFCLRKQCLCLTFLLLHLLGQVAATQRCPPQCPGRCPATPPTCAPGVRAVLDGCSCCLVCARQRGESCSDLEPCDESSGLYCDRSADPSNQTGICTAVEGDNCVFDGVIYRSGEKFQPSCKFQCTCRDGQIGCVPRCQLDVLLPEPNCPAPRKVEVPGECCEKWICGPDEEDSLGGLTLAAYRPEATLGVEVSDSSVNCIEQTTEWTACSKSCGMGFSTRVTNRNRQCEMLKQTRLCMVRPCEQEPEQPTDKKGKKCLRTKKSLKAIHLQFKNCTSLHTYKPRFCGVCSDGRCCTPHNTKTIQAEFQCSPGQIVKKPVMVIGTCTCHTNCPKNNEAFLQELELKTTRGKM

SEQ ID NO: 3107 - protein, 698 aa, Homo sapiens
MERGLPLLCAVLALVLAPAGAFRNDKCGDTIKIESPGYLTSPGYPHSYHPSEKCEWLIQAPDPYQRIMINFNPHFDLEDRDCKYDYVEVFDGENENGHFRGKFCGKIAPPPVVSSGPFLFIKFVSDYETHGAGFSIRYEIFKRGPECSQNYTTPSGVIKSPGFPEKYPNSLECTYIVFAPKMSEIILEFESFDLEPDSNPPGGMFCRYDRLEIWDGFPDVGPHIGRYCGQKTPGRIRSSSGILSMVFYTDSAIAKEGFSANYSVLQSSVSEDFKCMEALGMESGEIHSDQITASSQYSTNWSAERSRLNYPENGWTPGEDSYREWIQVDLGLLRFVTAVGTQGAISKETKKKYYVKTYKIDVSSNGEDWITIKEGNKPVLFQGNTNPTDVVVAVFPKPLITRFVRIKPATWETGISMRFEVYGCKITDYPCSGMLGMVSGLISDSQITSSNQGDRNWMPENIRLVTSRSGWALPPAPHSYINEWLQIDLGEEKIVRGIIIQGGKHRENKVFMRKFKIGYSNNGSDWKMIMDDSKRKAKSFEGNNNYDTPELRTFPALSTRFIRIYPERATHGGLGLRMELLGCEVEAPTAGPTTPNGNLVDECDDDQANCHSGTGDDFQLTGGTTVLATEKPTVIDSTIQSEFPTYGFNCEFGWGSHKTFCHWEHDNHVQLKWSVLTSKTGTHSGSHSRRWQLHLFPS

SEQ ID NO: 3108 - protein, 419 aa, Homo sapiens
MSCAGRAGPARLAALALLTCSLWPARADNASQEYYTALINVTVQEPGRGAPLTFRIDRGRYGLDSPKAEVRGQVLAPLPLHGVADHLGCDPQTRFFVPPNIKQWIALLQRGNCTFKEKISRAAFHNAVAVVIYNNKSKEEPVTMTHPGTGDIIAVMITELRGKDILSYLEKNISVQMTIAVGTRMPPKNFSRGSLVFVSISFIVLMIISSAWLIFYFIQKIRYTNARDRNQRRLGDAAKKAISKLTTRTVKKGDKETDPDFDHCAVCIESYKQNDVVRILPCKHVFHKSCVDPWLSEHCTCPMCKLNILKALGIVPNLPCTDNVAFDMERLTRTQAVNRRSALGDLAGDNSLGLEPLRTSGISPLPQDGELTPRTGEINIAVTKEWFIIASFGLLSALTLCYMIIRATASLNANEVEWF

SEQ ID NO: 3109 - protein, 439 aa, Homo sapiens
MKLANWYWLSSAVLATYGFLVVANNETEEIKDERAKDVCPVRLESRGKCEEAGECPYQVSLPPLTIQLPKQFSRIEEVFKEVQNLKEIVNSLKKSCQDCKLQADDNGDPGRNGLLLPSTGAPGEVGDNRVRELESEVNKLSSELKNAKEEINVLHGRLEKLNLVNMNNIENYVDSKVANLTFVVNSLDGKCSKCPSQEQIQSRPVQHLIYKDCSDYYAIGKRSSETYRVTPDPKNSSFEVYCDMETMGGGWTVLQARLDGSTNFTRTWQDYKAGFGNLRREFWLGNDKIHLLTKSKEMILRIDLEDFNGVELYALYDQFYVANEFLKYRLHVGNYNGTAGDALRFNKHYNHDLKFFTTPDKDNDRYPSGNCGLYYSSGWWFDACLSANLNGKYYHQKYRGVRNGIFWGTWPGVSEAHPGGYKSSFKEAKMMIRPKHFKP

SEQ ID NO: 3110 - protein, 39 aa, Homo sapiens
MSQWGHPARLEPDPQPAVANSPPGCVLVLIPGLDLVAAA

SEQ ID NO: 3111 - protein, 448 aa, Homo sapiens
  SITE (26): Xaa equals any amino acid
  SITE (50): Xaa equals any amino acid
  SITE (74): Xaa equals any amino acid
  SITE (80): Xaa equals any amino acid
MKSLSLLLAVALGLATAVSAGPAVIXCWFVEDASGKGLAKRPGALLLRQXPGEPPPRPDLDPELYLSVHDPAGXLQAAFXRYPRGAPAPHCEMSRFVPLPASAKWASGLTPAQNCPRALDGAWLMVSISSPVLSLSSLLRPQPEPQQEPVLITMATVVLTVLTHTPAPRVRLGQDALLDLSFAYMPPTSEAASSLAPGPPPFGLEWRRQHLGKGHLLLAATPGLNGQMPAAQEGAVAFAAWDDDEPWGPWTGNGTFWLPRVQPFQEGTYLATIHLPYLQGQVTLELAVYKPPKVSLMPATLARAAPGEAPPELLCLVSHFYPSGGLEVEWELRGGPGGRSQKAEGQRWLSALRHHSDGSVSLSGHLQPPPVTTEQHGARYACRIHHPSLPASGRSAEVTLEVAGLSGPSLEDSVGLFLSAFLLLGLFKALGWAAVYLSTCKDSKKKAE

SEQ ID NO: 3112 - protein, 99 aa, Homo sapiens
MAEGGFDPCECVCSHEHAMRRLINLLRQSQSYCTDTECLQELPGPSGDNGISVTMILVAWMVIALILFLLRPPNLRGSSLPGKPTSPHNGQDPPAPPVD

SEQ ID NO: 3113 - protein, 75 aa, Homo sapiens [sequence omitted]

SEQ ID NO: 3114 - protein, 38 aa, Homo sapiens
MLVVAFGLLVLYILLASSWKRPEPGILTDRQPLLHDGE

SEQ ID NO: 3115 - protein, 183 aa, Homo sapiens
  SITE (151): Xaa equals any amino acid
MITEGAQAPRLLLPPLLLLLTLPATGSDPVLCFTQYEESSGKCKGLLGGGVSVEDCCLNTAFAYQKRSGGLCQPCRSPRWSLWSTWAPCSVTCSEGSQLRYRRCVGWNGQCSGKVAPGTLEWQLQACEDQQCCPEMGGWSGWGPWEPCSVXCSKGTRTRSEPVITCSQVWGPLPRTGTGIRGL

SEQ ID NO: 3116 - protein, 14 aa, Homo sapiens
MVAFVVLTMCYTLL

SEQ ID NO: 3117 - protein, 918 aa, Homo sapiens
MPGGAGAARLCLLAFALQPLRPRAAREPGWTRGSEEGSPKLQHELIIPQWKTSESPVREKHPLKAELRVMAEGRELILDLEKNEQLFAPSYTETHYTSSGNPQTTTRKLEDHCFYHGTVRETELSSVTLSTCRGIRGLITVSSNLSYVIEPLPDSKGQHLIYRSEHLKPPPGNCGFEHSKPTTRDWALQFTQQTKKRPRRMKREDLNSMKYVELYLVADYLEFQKNRRDQDATKHKLIEIANYVDKFYRSLNIRIALVGLEVWTHGNMCEVSENPYSTLWSFLSWRRKLLAQKYHDNAQLITGMSFHGTTIGLAPLMAMCSVYQSGGVNMDHSENAIGVAATMAHEMGHNFGMTHDSADCCSASAADGGCIMAAATGHPFPKVFNGCNRRELDRYLQSGGGMCLSNMPDTRMLYGGRRCGNGYLEDGEECDCGEEEECNNPCCNASNCTLRPGAECAHGSCCHQCKLLAPGTLCREQARQCDLPEFCTGKSPHCPTNFYQMDGTPCEGGQAYCYNGMCLTYQEQCQQLWGPGARPAPDLCFEKVNVAGDTFGNCGKDMNGEHRKCNMRDAKCGKIQCQSSEARPLESNAVPIDTTIIMNGRQIQCRGTHVYRGPEEEGDMLDPGLVMTGTKCGYNHICFEGQCRNTSFFETEGCGKKCNGHGVCNNNQNCHCLPGWAPPFCNTPGHGGSIDSGPMPPESVGPVVAGVLVAILVLAVLMLMYYCCRQNNKLGQLKPSALPSKLRQQFSCPFRVSQNSGTGHANPTFKLQTPQGKRKVINTPEILRKPSQPPPRPPPDYLRGGSPPAPLPAHLSRAARNSPGPGSQIERTESSRRPPPSRPIPPAPNCIVSQDFSRPRPPQKALPANPVPGRRSLPRPGGASPLRPPGAGPQQSRPLAALAPKFPEYRSQRAGGMISSKI

SEQ ID NO: 3118 - protein, 383 aa, Homo sapiens
  SITE (145): Xaa equals any amino acid
MGVKASQTGFVVLVLLQCCSAYKLVCYYTSWSQYREGDGSCFPDALDRFLCTHIIYSFANISNDHIDTWEWNDVTLYGMLNTLKNRNPNLKTLLSVGGWNFGSQRFSKIASNTQSRRTFIKSVPPFLRTHGFDGLDLAWLYPGRXDKQHFTTLIKEMKAEFIKEAQPGKKQLLLSAALSAGKVTIDSSYDIAKISQHLDFISIMTYDFHGAWRGTTGHHSPLFRGQEDASPDRFSNTDYAVGYMLRLGAPASKLVMGIPTFGRSFTLASSETGVGAPISGPGIPGRFTKEAGTLAYYEICDFLRGATVHRILGQQVPYATKGNQWVGYDDQESVKSKVQYLKDRQLAGAMVWALDLDDFQGSFCGQDLRFPLTNAIKDALAAT

SEQ ID NO: 3119 - protein, 335 aa, Homo sapiens [sequence omitted]

SEQ ID NO: 3120 - protein, 63 aa, Homo sapiens
SLYHVPPNNCSLLLQFILFTLVTYISTVHRHRLIFSIHFLALSCLWINIELVGISAGNNITFF

SEQ ID NO: 3121 - protein, 135 aa, Homo sapiens
MSFGVLGEGSHEAILLFLALLGLTHSVGKPGAHGASEMPPGWLAWPGAGGRGRRPRWQVEARLTTTEETSRWGRAGLAQLPQAYGGEGGTLPTLGWWHQSSCLFRRWYGGSDPSLGTGPVLENSDSFFVVFYFCF

SEQ ID NO: 3122 - protein, 42 aa, Homo sapiens
MLVTCSVCCYLFWLIAILAQLNPLFGPQLKNETIWYLKYHWP

SEQ ID NO: 3123 - protein, 109 aa, Homo sapiens
MLKLTPLPSKMKVSAALLCLLLMAATFSPQGLAQPDSVSIPITCCFNVINRKIPIQRLESYTRITNIQCPKEAVIFKTKRGKEVCADPKERWVRDSMKHLDQIFQNLKP

SEQ ID NO: 3124 - protein, 456 aa, Homo sapiens
MAAAGRLPSSWALFSPLLAGLALLGVGPVPARALHNVTAELFGAEAWGTLAAFGDLNSDKQTDLFVLRERNDLIVFLADQNAPYFKPKVKVSFKNHSALITSVVPGDYDGDSQMDVLLTYLPKNYAKSELGAVIFWGQNQTLDPNNMTILNRTFQDEPLIMDFNGDLIPDIFGITNESNQPQILLGGNLSWHPALTTTSKMRIPHSHAFIDLTEDFTADLFLTTLNATTSTFQFEIWENLDGNFSVSTILEKPQNMMVVGQSAFADFDGDGHMDHLLPGCEDKNCQKSTIYLVRSGMKQWVPVLQDFSNKGTLWGFVPFVDEQQPTEIPIPITLHIGDYNMDGYPDALVILKNTSGSNQQAFLLENVPCNNASCEEARRMFKVYWELTDLNQIKDAMVATFFDIYEDGILDIVVLSKGYTKNDFAIHTLKNNFEADAYFVKVIVLSGLCSNDCPRR

SEQ ID NO: 3125 - protein, 202 aa, Homo sapiens
LFCVLVPPSCPSGEGKDKPWAMRLPLLLVFASVIPGAVLLLDTRQFLIYNEDHKRCVDAVSPSAVQTAACNQDAESQKFRWVSESQIMSVAFKLCLGVPSKTDWVAITLYACDSKSEFQKWECKNDTLLGIKGEDLFFNYGNRQEKNIMLYKGSGLWSRWKIYGTTDNLCSRGYEAMYTLLGNANGATCAFPFSLKTSGTQI

SEQ ID NO: 3126 - protein, 434 aa, Homo sapiens
MESESESGAAADTPPLETLSFHGDEEIIEVVELDPGPPDPDDLAQEMEDVDFEEEEEEEGNEEGWVLEPQEGVVGSMEGPDDSEVTFALHSASVFCVSLDPKTNTLAVTGGEDDKAFVWRLSDGELLFECAGHKDSVTCAGFSHDSTLVATGDMSGLLKVWQVDTKEEVWSFEAGDLEWMEWHPRAPVLLAGTADGNTWMWKVPNGDCKTFQGPNCPATCGRVLPDGKRAVVGYEDGTIRIWDLKQGSPIHVLKGTEGHQGPLTCVAANQDGSLILTGSVDCQAKLVSATTGKVVGVFRPETVASQPSLGEGEESESNSVESLGFCSVMPLAAVGYLDGTLAIYDLATQTLRHQCQHQSGIVQLLWEAGTAVVYTCSLDGIVRLWDARTGRLLTDYRGHTAEILDFALSKDASLVVTTSGDHKAKVFCVQRPDR

SEQ ID NO: 3127 - protein, 42 aa, Homo sapiens
MKHILFVSCLVPCGCSVQELLGIDAVEFCIQFFLSSETTLEK

SEQ ID NO: 3128 - protein, 12 aa, Homo sapiens
MQLCFSYLCLED

SEQ ID NO: 3129 - protein, 161 aa, Homo sapiens
MSVPGPYQAATGPSSAPSAPPSYEETVAVNSYYPTPPAPMPGPTTGLVTGPDGKGMNPPSYYTQPAPIPNNNPITVQTVYVQHPITFLDRPIQMCCPSCNKMIVSQLSYNAGALTWLSCGSLCLLGCIAGCCFIPFCVDALQDVDHYCPNCRALLGTYKRL

SEQ ID NO: 3130 - protein, 354 aa, Homo sapiens
MFLDQVAKFIIDNTKGQMLGLGNPSFSDPFTGGGRYVPGSSGSSNTLPTADPFTGAGRYVPGSASMGTTMAGVDPFTGNSAYRSAASKTMNIYFPKKEAVTFDQANPTQILGKLKELNGTAPEEKKLTEDDLILLEKILSLICNSSSEKPTVQQLQILWKAINCPEDIVFPALDILRLSIKHPSVNENFCNEKEGAQFSSHLINLLNPKGKPANQLLALRTFCNCFVGQAGQKLMMSQRESLMSHAIELKSGSNKNIHIALATLALNYSVCFHKDHNIEGKAQCLSLISTILEVVQDLEATFRLLVALGTLISDDSNAVQLAKSLGVDSQIKKYSSVSEPAKVSECCRFILNLL

SEQ ID NO: 3131 - protein, 497 aa, Homo sapiens
MSQDGASQFQEVIRQELELSVKKELEKILTTASSHEFEHTKKDLDGFRKLFHRFLQEKGPSVDWGKIQRPPEDSIQPYEKIKARGLPDNISSVLNKLVVVKLNGGLGTSMGCKGPKSLIGVRNENTFLDLTVQQIEHLNKTYNTDVPLVLMNSFNTDEDTKKILQKYNHCRVKIYTFNQSRYPRINKESLLPVAKDVSYSGENTEAWYPPGHGDIYASFYNSGLLDTFIGEGKEYIFVSNIDNLGATVDLYILNHLMNPPNGKRCEFVMEVTNKTRADVKGGTLTQYEGKLRLVEIAQVPKAHVDEFKSVSKFKIFNTNNLWISLAAVKRLQEQNAIDMEIIVNAKTLDGGLNVIQLETAVGAAIKSFENSLGINVPRSRFLPVKTTSDLLLVMSNLYSLNAGSLTMSEKREFPTVPLVKLGSSFTKVQDYLRRFESIPDMLELDHLTVSGDVTFGKNVSLKGTVIIIANHGDRIDIPPGAVLENKIVSGNLRILDH

SEQ ID NO: 3132 - protein, 45 aa, Homo sapiens
MSFLRVTLLYCVWCIATESQSDKFSMCKCDAFNPDYCRLNLLYFL

SEQ ID NO: 3133 - protein, 53 aa, Homo sapiens
MMDTMVLHLNIRVIQMLRRLFFCRWIRTVFAILTMSSLCYGFIEPSVQLNRLR

SEQ ID NO: 3134 - protein, 81 aa, Homo sapiens
MVVAGVVVLILALVLAWLSTYVADSGSNQLLGAIVSAGDTSVLHLGHVDHLVAGQGNPEPTELPHPSEDKQVQAAAVQRPP

SEQ ID NO: 3135 - protein, 136 aa, Homo sapiens
MIEDTMTLLSLLGRIMRYFLLRPETLFLLCISLALWSYFFHTDEVKTIVKSSRDAVKMVKGKVAEIMQNDRLGGLDVLEAEFSKTWEFKNHNVGGVLHPGPERPHGGPLRSSHGSGQQDAPVHLRDLRRARGRDCS

SEQ ID NO: 3136 - protein, 97 aa, Homo sapiens
MFCPLKLILLPVLLDYSLGLNDLNVSPPELTVHVGDSALMGCVFQSTEDKCIIQDRLDSVTRRARQGRICAILLLQSQCAYWAVPEPRTLDGGQLMQ

SEQ ID NO: 3137 - protein, 227 aa, Homo sapiens
MAGVGAGPLRAMGRQALLLLALCATGAQGLYFHIGETEKRCFIEEIPDETMVIGNYRTQMWDKQKEVFLPSTPGLGMHVEVKDPDGKVVLSRQYGSEGRFTFTSHTPGDHQICLHSNSTRMALFAGGKLRVHLDIQVGEHANNYPEIAAKDKLTELQLRARQLLDQVEQIQKEQDYQRYREERFRLTSESTNQRVLWWSIAQTVILILTGIWQMRHLKSFFEAKKLV

SEQ ID NO: 3138 - protein, 426 aa, Homo sapiens
MPLLWLRGFLLASCWIIVRSSPTPGSEGHSAAPDCPSCALAALPKDVPNSQPEMVEAVKKHILNMLHLKKRPDVTQPVPKAALLNAIRKLHVGKVGENGYVEIEDDIGRRAEMNELMEQTSEIITFAESGTARKTLHFEISKEGSDLSVVERAEVWLFLKVPKANRTRTKVTIRLFQQQKHPQGSLDTGEEAEEVGLKGERSELLLSEKVVDARKSTWHVFPVSSSIQRLLDQGKSSLDVRIACEQCQESGASLVLLGKKKKKEEEGEGKKKGGGEGGAGADEEKEQSHRPFLMLQARQSEDHPHRRRRRGLECDGKVNICCKKQFFVSFKDIGWNDWIIAPSGYHANYCEGECPSHIAGTSGSSLSFHSTVINHYRMRGHSPFANLKSCCVPTKLRPMSMLYYDDGQNIIKKDIQNMIVEECGCS

SEQ ID NO: 3139 - protein, 249 aa, Homo sapiens
MAARRSQRRRGRRGEPGTALLVPLALGLGLALACLGLLLAVVSLGSRASLSAQEPAQEELVAEEDQDPSELNPQTEESQDPAPFLNRLVRPRRSAPKGRKTRARRAIAAHYEVHPRPGQDGAQAGVDGTVSGWEEARINSSSPLRYNRQIGEFIVTRAGLYYLYCQVHFDEGKAVYLKLDLLVDGVLALRCLEEFSATAASSLGPQLRLCQVSGLLALRPGSSLRIRTLPWAHLKAAPFLTYFGLFQVH

SEQ ID NO: 3140 - protein, 73 aa, Homo sapiens
PYELTRWLIWTLWVFLMPVQGWFSACTGIHIMQCHAHREGSVREVCLGSKYLLLTLFRISDNKKQSDFGQFYY

SEQ ID NO: 3141 - protein, 616 aa, Homo sapiens
MAPRARRRRPLFALLLLCALLARLQVALQIAPPCTSEKHYEHLGRCCNKCEPGKYMSSKCTTTSDSVCLPCGPDEYLDSWNEEDKCLLHKVCDTGKALVAVVAGNSTTPRRCACTAGYHWSQDCECCRRNTECAPGLGAQHPLQLNKDTVCKPCLAGYFSDAFSSTDKCRPWTNCTFLGKRVEHHGTEKSDVVCSSSLPARKPPNEPHVYLPGLIILLLFASVALVAAIIFGVCYRKKGKALTANLWHWINEACGRLSGDKESSGDSCVSTHTANFGQQGACEGVLLLTLEEKTFPEDMCYPDQGGVCQGTCVGGGPYAQGEDARMLSLVSKTEIEEDSFRQMPTEDEYMDRPSQPTDQLLFLTEPGSKSTPPFSEPLEVGENDSLSQCFTGTQSTVGSESCNCTEPLCRTDWTPMSSENYLQKEVDSGHCPHWAASPSPNWADVCTGCRNPPGEDCEPLVGSPKRGPLPQCAYGMGLPPEEEASRTEARDQPEDGADGRLPSSARAGAGSGSSPGGQSPASGNVTGNSNSTFISSGQVMNFKGDIIVVYVSQTSQEGAAAAAEPMGRPVQEETLARRDSFAGNGPRFPDPCGGPEGLREPEKASRPVQEQGGAKA

SEQ ID NO: 3142 - protein, 100 aa, Homo sapiens
  SITE (41): Xaa equals any amino acid
MYFCGSRSLFFLSLSLLSIVISFGSFTASPGHLTSQFFKRXRVHKLWHFPVYSVLSTMACWVGQASSILATAQIEVAPGSISASPNFPKFRLVCSLLPVP

SEQ ID NO: 3143 - protein, 82 aa, Homo sapiens
ACGSQLFRCTGITGGNFKNKKQSKTNKENRCASVDRELCAGTSILNNHCSWSQMTQKRCTTFVRYHIIMSTFSNLGDIVCKP

SEQ ID NO: 3144 - protein, 455 aa, Homo sapiens
MGLSTVPDLLLPLVLLELLVGIYPSGVIGLVPHLGDREKRDSVCPQGKYIHPQNNSICCTKCHKGTYLYNDCPGPGQDTDCRECESGSFTASENHLRHCLSCSKCRKEMGQVEISSCTVDRDTVCGCRKNQYRHYWSENLFQCFNCSLCLNGTVHLSCQEKQNTVCTCHAGFFLRENECVSCSNCKKSLECTKLCLPQIENVKGTEDSGTTVLLPLVIFFGLCLLSLLFIGLMYRYQRWKSKLYSIVCGKSTPEKEGELEGTTTKPLAPNPSFSPTPGFTPTLGFSPVPSSTFTSSSTYTPGDCPNFAAPRREVAPPYQGADPILATALASDPIPNPLQKWEDSAHKPQSLDTDDPATLYAVVENVPPLRWKEFVRRLGLSDHEIDRLELQNGRCLREAQYSMLATWRRRTPRREATLELLGRVLRDMDLLGCLEDIEEALCGPAALPPAPSLLR

SEQ ID NO: 3145 - protein, 135 aa, Homo sapiens
  SITE (45): Xaa equals any amino acid
MAVPPSCKISSPGWTVSLCSEAAPLKILLMVRGLSPCREPFPPSXLKPSPADIFSSVTVQTVASAVDSTETSLAAEAEAAESVEELRSGMASGVSFLVTITACLGSRAWRRMAKASWCVVPLRDLPLMERTSLPF

SEQ ID NO: 3146 - protein, 30 aa, Homo sapiens
MNLSITPLELLISFLLGFSPIIYSSVKWKS

SEQ ID NO: 3147 - protein, 337 aa, Homo sapiens
MRPTLLWSLLLLLGVFAAAAAAPPDPLSQLPAPQHPKIRLYNAEQVLSWEPVALSNSTRPVVYQVQFKYTDSKWFTADIMSIGVNCTQITATECDFTAASPSAGFPMDFNVTLRLRAELGALHSAWVTMPWFQHYRNVTVGPPENIEVTPGEGSLIIRFSSPFDIADTSTAFFCYYVHYWEKGGIQQVKGPFRSNSISLDNLKPSRVYCLQVQAQLLWNKSNIFRVGHLSNISCYETMADASTELQQVILISVGTFSLLSVLAGACFFLVLKYRGLIKYWFHTPPSIPLQIEEYLKDPTQPILEALDKDSSPKDDVWDSVSIISFPEKEQEDVLQTL

SEQ ID NO: 3148 - protein, 285 aa, Homo sapiens
MVMRPLWSLLLWEALLPITVTGAQVLSKVGGSVLLVAARPPGFQVREAIWRSLWPSEELLATFFRGSLETLYHSRFLGRAQLHSNLSLELGPLESGDSGNFSVLMVDTRGQPWTQTLQLKVYDAVPRPVVQVFIAVERDAQPSKTCQVFLSCWAPNISEITYSWRRETTMDFGMEPHSLFTDGQVLSISLGPGDRDVAYSCIVSNPVSWDLATVTPWDSCHHEAAPGKASYKDVLLVVVPVSLLLMLVTLFSAWHWCPCSGKKKKDVHADRVGPETENPLVQDLP

SEQ ID NO: 3149 - protein, 616 aa, Homo sapiens; identical to SEQ ID NO: 3141

SEQ ID NO: 3150 - protein, 130 aa, Homo sapiens
VADVAESGPGLAFIAYPKAVTMMPLPTFWSILFFIMLLLLGLDSQFVEVEGQITSLVDLYPSFLRKGYRREIFIAFVCSISYLLGLTMVTEGGMYVFQLFDYYAASGVCLLWVASLNVLLLPGYMEVITL

SEQ ID NO: 3151 - protein, 196 aa, Homo sapiens
  SITE (153): Xaa equals any amino acid
  SITE (169): Xaa equals any amino acid
  SITE (190): Xaa equals any amino acid
GRANWEQSTQSRGARDAGPGLGRGCHPDAADGHGGASPGTLPRKAGVFSDLSNQELKAVHSFLWSKKELRLQPSSTTTMAKNTVFLIEMLLPKKYHVLRFLDKGERHPVREARAVIFFGDQEHPNVTEFAVGPLPGPCYMRALSPRPGYQSSXGIEAHLHSRVCPSSYXTCRKPPSPLHQFFLQYHRLSXFQDCHD

SEQ ID NO: 3152 - protein, 223 aa, Homo sapiens
MATPQSIFIFAICILMITELILASKSYYDILGVPKSASERQIKKAFHKLAMKYHPDKNKSPDAEAKFREIAEAYETLSDANRRKEYDTLGHSAFTSGKGQRGSGSSFEQSFNFNFDDLFKDFGFFGQNQNTGSKKRFENHFQTRQDGGSSRQRHHFQEFSFGGGLFDDMFEDMEKMFSFSGFDSTNQHTVQTENRFHGSSKHCRTVTQRRGNMVTTYTDCSGQ

SEQ ID NO: 3153 - protein, 251 aa, Homo sapiens
MTNLAVADLCLLCTLPFVLHSLRDTSDTPLCQLSQGIYLTNRYMSISLVTAIAVDRYVAVRHPLRARGLRSPRQAAAVCAVLWVLVIGSLVARWLLGIQEGGFCFRSTRHNFNSMAFPLLGFYLPLAVVVFCSLKVVTALAQRPPTDVGQAEATRKAARMVWANLLVFVVCFLPLHVGLTVRLAVGWNACALLETIRRALYITSKLSDANCCLDAICYYYMAKEFQEASALAVAPSAKAHKSQDSLCVTLA

SEQ ID NO: 3154 - protein, 56 aa, Homo sapiens
  SITE (17): Xaa equals any amino acid
  SITE (29): Xaa equals any amino acid
  SITE (32): Xaa equals any amino acid
  SITE (42): Xaa equals any amino acid
  SITE (50): Xaa equals any amino acid
MLLVLPDTLLLSLVGPXSAHPQDLLLNAXSSXEVYPEFLNSXGLNGELGXSSLINK

SEQ ID NO: 3155 - protein, 126 aa, Homo sapiens
VLAVLVLPCWWPAGPGAGERNRWDEGDRACSCPEAQPCPSCHVLSTCMPLPDALLHSLVCPWGSWEGVFLSPLNSDSTQPLWMDLGFYSGLCMAGCQGEVPSSEVLQDTCVQKRWMWNTQDQNGSV

SEQ ID NO: 3156 - protein, 606 aa, Homo sapiens [sequence omitted]

SEQ ID NO: 3157 - protein, 66 aa, Homo sapiens
MFCVSNNSQVLLLLLLFQEHTLRTIVLLLCTPTHSQLPRKKSTSRAKISVEVLVPYLVQDLPSRIS

SEQ ID NO: 3158 - protein, 155 aa, Homo sapiens [sequence omitted]

SEQ ID NO: 3159 - protein, 331 aa, Homo sapiens
MSARLPVLSPPRWPRLLLLSLLLLGAVPGPRRSGAFYLPGLAPVNFCDEEKKSDECKAEIELFVNRLDSVESVLPYEYTAFDFCQASEGKRPSENLGQVLFGERIEPSPYKFTFNKKETCKLVCTKTYHTEKAEDKQKLEFLKKSMLLNYQHHWIVDNMPVTWCYDVEDGQRFCNPGFPIGCYITDKGHAKDACVISSDFHERDTFYIFNHVDIKIYYHVVETGSMGARLVAAKLEPKSFKHTHIDKPDCSGPPMDISNKASGEIKIAYTYSVSFEEDDKIRWASRWDYILESMPHTHIQWFSIMNSLVIVSLLIWNGSYDYVTDTAQRYC

SEQ ID NO: 3160 - protein, 194 aa, Homo sapiens
DPRVRPDAVGFTAGKSVETADPRSGDVCVEPCTCFLRPVALPFSLTSTMLLLVTSLLLCELPHPAFLLIPEKSDLRTVAPASSLNVRFDSRTMNLSWDCQENTTFSKCFLTDKKNRVVEPRLSNNECSCTFREICLHEGVTFEVHVNTSQRGFQQKLLYPNSGREGTAAQNFSCFIYNADLMNCTWARGPTAPP

SEQ ID NO: 3161 - protein, 119 aa, Homo sapiens
HLRENKVVCMCVCVCLCVCVSVCLYVYGSMCMKLVRKNIKKEQGDSDSHTVGGTVVCRKLLSLQQTMGNSGSETVQHLWESCLHSHLRTWRMQFARHTREGLHCFLLFNLMYTSFGGIK

SEQ ID NO: 3162 - protein, 180 aa, Homo sapiens
MASTSYDYCRVPMEDGDKRCKLLLGIGILVLLIIVILGVPLIIFTIKANSEACRDGLRAVMECRNVTHLLQQELTEAQKGFQDVEAQAATCNHTVMALMASLDAEKAQGQKKVEELEGEITTLNHKLQDASAEVERLRRENQVLSVRIADKKYYPSSQDSSSAAAPQLLIVLLGLSALLQ

SEQ ID NO: 3163 - protein, 493 aa, Homo sapiens
MSALGVTVALLVWAAFLLLVSMWRQVHSSWNLPPGPFPLPIIGNLFQLELKNIPKSFTRLAQRFGPVFTLYVGSQRMVVMHGYKAVKEALLDYKDEFSGRGDLPAFHAHRDRGIIFNNGPTWKDIRRFSLTTLRNYGMGKQGNESRIQREAHFLLEALRKTQGQPFDPTFLIGCAPCNVIADILFRKHFDYNDEKFLRLMYLFNENFHLLSTPWLQLYNNFPSFLHYLPGSHRKVIKNVAEVKEYVSERVKEHHQSLDPNCPRDLTDCLLVEMEKEKHSAERLYTMDGITVTVADLFFAGTETTSTTLRYGLLILMKYPEIEEKLHEEIDRVIGPSRIPAIKDRQEMPYMDAVVHEIQRFITLVPSNLPHEATRDTIFRGYLIPKGTVVVPTLDSVLYDNQEFPDPEKFKPEHFLNENGKFKYSDYFKPFSTGKRVCAGEGLARMELFLLLCAILQHFNLKPLVDPKDIDLSPIHIGFGCIPPRYKLCVIPRS

SEQ ID NO: 3164 - protein, 89 aa, Homo sapiens; identical to SEQ ID NO: 2964

SEQ ID NO: 3165 - protein, 245 aa, Homo sapiens
MDVGPSSLPHLGLKLLLLLLLLPLRGQANTGCYGIPGMPGLPGAPGKDGYDGLPGPKGEPGIPAIPGIRGPKGQKGEPGLPGHPGKNGPMGPPGMPGVPGPMGIPGEPGEEGRYKQKFQSVFTVTRQTHQPPAPNSLIRFNAVLTNPQGDYDTSTGKFTCKVPGLYYFVYHASHTANLCVLLYRSGVKVVTFCGHTSKTNQVNSGGVLLRLQVGEEVWLAVNDYYDMVGIQGSDSVFSGFLLFPD

SEQ ID NO: 3166 - protein, 156 aa, Homo sapiens
MRAAGTLLAFCCLVLSTTGGPSPDTCSQDLNSRVKPGFPKTIKTNDPGVLQAARYSVEKFNNCTNDMFLFKESRITRALVQIVKGLKYMLEVEIGRTTCKKNQHCVWMTVTFQTNHTLKQTLSCYSEVWVVPWLQHFEVPVLPLSLTPASSARPQP

SEQ ID NO: 3167 - protein, 151 aa, Homo sapiens
SASFSPAPRAAPPLGHRSRAGGWRACCPPARKMVPSAGQLALFALGIVLAACQALENSTSPLSADPPVAAAVVSHFNDCPDSHTQFCFHGTCSFWCRRTSQHVSAILGTLVHAVSMRTSWPWWLPARRSRPSPPWWWSPSWPWLSLSSHVC

SEQ ID NO: 3168 - protein, 371 aa, Homo sapiens [sequence omitted]

SEQ ID NO: 3169 - protein, 214 aa, Homo sapiens
  SITE (208): Xaa equals any amino acid
MALRVLLLTALTLCHGFNLDTENAMTFQENARGFGQSVVQLQGSRVVVGAPQEIVAANQRGSLYQCDYSTGSCEPIHLQVPVEAVNMSLGLSLAATTSPPQLLACGPTVHQTCSENTYVKGLCFLFGSNLRQQPQKFPEALRGCPQEDSDIAFLIDGSGSIIPHDFRRMKEFVSTVMEQLKKSKTLFSLMQYSEEFRIHFTSKSSRTXLTQDHW

SEQ ID NO: 3170 - protein, 414 aa, Homo sapiens
MLVDGPSERPALCFLLLAVAMSFFGSALSIDETRAHLLLKEKMMRLGGRLVLNTKEELANERLMTLKIAEMKEAMRTLIFPPSMHFFQAKHLIERSQVFNILRMMPKGAALHLHDIGIVTMDWLVRNVTYRPHCHICFTPRGIMQFRFAHPTPRPSEKCSKWILLEDYRKRVQNVTEFDDSLLRNFTLVTQHPEVIYTNQNVVWSKFETIFFTISGLIHYAPVFRDYVFRSMQEFYEDNVLYMEIRARLLPVYELSGEHHDEEWSVKTYQEVAQKFVETHPEFIGIKIIYSDHRSKDVAVIAESIRMAMGLRIKFPTVVAGFDLVGHEDTGHSLHDYKEALMIPAKDGVKLPYFFHAGETDWQGTSIDRNILDALMLNTTRIGHGFALSKHPAVRTYSWKKDIPIEAVPSLTRC

SEQ ID NO: 3171 - protein, 112 aa, Homo sapiens
MDVGPSSLPHLGLKLLLLLLLLPLRGQANTGCYGIPGMPGLPGAPGKDGYDGLPGPKGEPGIPAIPGIRGPKGQIQAEIPVSVHGHSADPPAPCTQQPDQIQRGPHQPAGRL

SEQ ID NO: 3172 - protein, 219 aa, Homo sapiens
MEGAALLRVSVLCIWMSALFLGVGVRAEEAGARVQQNVPSGTDTGDPQSKPLGDWAAGTMDPESSIFIEDAIKYFKEKVSTQNLLLLLTDNEAWNGFVAAAELPRNEADELRKALDNLARQMIMKDKNWHDKGQQYRNWFLKEFPRLKSELEDNIRRLRALADGVQKVHKGTTIANVVSGSLSISSGILTLVGMGLAPFTEGAALYSWNLGWSWESQPL

SEQ ID NO: 3173 - protein, 55 aa, Homo sapiens
  SITE (39): Xaa equals any amino acid
  SITE (40): Xaa equals any amino acid
MHLQQNTYSFHIRMASLCLSSLTEIELPVGRVLILLILXXAGIFGNLPRRVPCTQ

SEQ ID NO: 3174 - protein, 472 aa, Homo sapiens
MIRTRRGWSSMWPWIGVGYLAGCLVHALGEKQPELQISERDVLCVQIAGLCHDLGHGPFSHMFDGRFIPLARPEVKWTHEQGSVMMFEHLINSNGIKPVMEQYGLIPEEDICFIKEQIVGPLESPVEDSLWPYKGRPENKSFLYEIVSNKRNGIDVDKWDYFARDCHHLGIQNNFDYKRFIKFARVCEVDNELRICARDKEVGNLYDMFHTRNSLHRRAYQHKVGNIIDTMITDAFLEADDYIEITGAGGKKYRISTAIDDMEAYTKLTDNIFLEILYSTDPKLKDAREILKQIEYRNLFKYVGETQPTGQIKIKREDYESLPKEVASAKPKVLLDVKLKAEDFIVDVINMDYGMQEKNPIDHVSFYCKTAPNRAIRITKNQVSQLLPEKFAEQLIRVYCKKVDRKSLYAARQYFVQWCADRNFTKPQDGDVIAPLITPQKKEWNDSTSVQNPTRLREASKSRVQLFKDDPM

SEQ ID NO: 3175 - protein, 482 aa, Homo sapiens
MASFSAETNSTDLLSQPWNEPPVILSMVILSLTFLLGLPGNGLVLWVAGLKMQRTVNTIWFLHLTLADLLCCLSLPFSLAHLALQGQWPYGRFLCKLIPSIIVLNMFASVFLLTAISLDRCLVVFKPIWCQNHRNVGMACSICGCIWVVAFVMCIPVFVYREIFTTDNHNRCGYKFGLSSSLDYPDFYGDPLENRSLENIVQPPGEMNDRLDPSSFQTNDHPWTVPTVFQPQTFQRPSADSLPRGSARLTSQNLYSNVFKPADVVSPKIPSGFPIEDHETSPLDNSDAFLSTHLKLFPSASSNSFYESELPQGFQDYYNLGQFTDDDQVPTPLVAITITRLVVGFLLPSVIMIACYSFIVFRMQRGRFAKSQSKTFRVAVVVVAVFLVCWTPYHIFGVLSLLTDPETPLGKTLMSWDHVCIALASANSCFNPFLYALLGKDFRKKARQSIQGILEAAFSEELTRSTHCPSNNVISERNSTTV

SEQ ID NO: 3176 - protein, 22 aa, Homo sapiens
  SITE (5): Xaa equals any amino acid
  SITE (10): Xaa equals any amino acid
  SITE (11): Xaa equals any amino acid
FFCLXMLLLXXTCAVSTQGEMD

SEQ ID NO: 3177 - protein, 277 aa, Homo sapiens
  SITE (148): Xaa equals any amino acid
  SITE (150): Xaa equals any amino acid
MVRLPLQCVLWGCLLTAVHPEPPTACREKQYLINSQCCSLCQPGQKLVSDCTEFTETECLPCGESEFLDTWNRETHCHQHKYCDPNLGLRVQQKGTSETDTICTCEEGWHCTSEACESCVLHRSCSPGFGVKQIATGVSDTICKPCPXGXFSNVSSAFEKCHPWTSCETKDLVVQQAGTNKTDVVCGPQDRLRALVVIPIIFGILFAILLVLVFIKKVAKKPTNKAPHPKQEPQEINFPDDLPGSNTAAPVQETLHGCQPVTQEDGKESRISVQERQ

SEQ ID NO: 3178 - protein, 49 aa, Homo sapiens
MFPCHLWGFCYLTSLAAFLVDAIPREANSVPRRGWLVRISQTHSARLQF

SEQ ID NO: 3179 - protein, 285 aa, Homo sapiens; identical to SEQ ID NO: 3148

SEQ ID NO: 3180 - protein, 289 aa, Homo sapiens
MVKLLVAKILCMVGVFFFMLLGSLLPVKIIETDFEKAHRSKKILSLCNTFGGGVFLATCFNALLPAVREKLQKVLSLGHISTDYPLAETILLLGFFMTVFLEQLILTFRKEKPSFIDLDTFNAGSDVGSDSEYESPFMGGARGHALYVEPHGHGPSLSVQGLSRASPVRLLSLAFALSAHSVFEGLALGLQEEGEKVVSLFVGVAVHETLVAVALGISMARSAMPLRYAAKLAVTVSAMIPLGIGLGLGIESAQGVPGSVASVLLQGLEGGTFLFITFLEIWQGAGGEE

SEQ ID NO: 3181 - protein, 326 aa, Homo sapiens
  SITE (249): Xaa equals any amino acid
  SITE (320): Xaa equals any amino acid
MSENDNVFCAQLQCFHFPTLRHHDLHSWHAESCYEKSSFLCKRSQTCVDIKDNVVDEGFYFTPKGDDPCLSCTCHGGEPEMCVAALCERPQGCQQYRKDPKECCKFMCLDPDGNSLFDSMASGMRLVVSCISSFLILSLLLFMVHRLRQRRRERIESLIGANLHHFNLGRRIPGFDYGPDGFGTGLTPLHLSDDGEGGTFHFHDPPPPYTAYKYPDIGQPDDPPPPYEASIHPDSVFYDPADDDAFEPXEVSLPAPGDGGSEGALLRRLEQPLPTAGASLADLEDSADSSSALLVPPDPAQSGSTPAAEALPGGGRHSRXSLNTVV

SEQ ID NO: 3182 - protein, 208 aa, Homo sapiens
MDVGPSSLPHLGLKLLLLLLLLPLRGQANTGCYGIPGMPGLPGAPGKDGYDGLPGPKGEPGIPAIPGIRGPKGQKGEPGLPGHPGKNGPMGPPGMPGVPGPMGIPGEPGEEGRYKQKFQSVFTVTRQTHQPPAPNSLIRFNAVLTNPQEIMTRALASSPAKSPASTTLSTTRRIQPTCACCCTAAASKWSPSVATRPKPIRSTRAVCC

SEQ ID NO: 3183 - protein, 451 aa, Homo sapiens
STHASELESSMEASWGSFNAERGWYVSVQQPEEAEAEELSPLLSNELHRQRSPGVSFGLSVFNLMNAIMGSGILGLAYVMANTGVFGFSFLLLTVALLASYSVHLLLSMCIQTAVTSYEDLGLFAFGLPGKLVVAGTIIIQNIGAMSSYLLIIKTELPAAIAEFLTGDYSRYWYLDGQTLLIIICVGIVFPLALLPKIGFLGYTSSLSFFFMMFFALVVIIKKWSIPCPLTLNYVEKGFQSAYALPTMAFSFLCHTSILPIYCELQSPSKKRMQNVTNTAIALSFLIYFISALFGYLTFYDKVESELLKGYSKYLSHDVVVMTVKLCILFAVLLTVPLIHFPARKAVTMMFFSNFPFSWIRHFLITLALNIIIVLLAIYVPDIRNVFGVVGASTSTCLIFIFPGLFYLKLSREDFLSWKKLGVGVQWCDLSSLQPLPPGLKQSSHLSLQSS

SEQ ID NO: 3184 - protein, 61 aa, Homo sapiens [sequence omitted]

SEQ ID NO: 3185 - protein, 181 aa, Homo sapiens
  SITE (161): Xaa equals any amino acid
  SITE (178): Xaa equals any amino acid
MRALLARLLLCVLVVSDSKGSNELHQVPSNCDCLNGGTCVSNKYFSNIHWCNCPKKFGGQHCEIDKSKTCYEGNGHFYRGKASTDTMGRPCLPWNSATVLQQTYHAHRSDALQLGLGKHNYCRNPDNRRRPWCYVQVGLKPLVQECMVHDCADGKKPSSPXEELKKKKKFQCGQKTFXAPL

SEQ ID NO: 3186 - protein, 262 aa, Homo sapiens
MTILGTTFGMVFSLLQVVSGESGYAQNGDLEDAELDDYSFSCYSQLEVNGSQHSLTCAFEDPDVNTTNLEFEICGALVEVKCLNFRKLQEIYFIETKKFLLIGKSNICVKVGEKSLTCKKIDLTTIVKPEAPFDLSVIYREGANDFVVTFNTSHLQKKYVKVLMHDVAYRQEKDENKWTHVNLSSTKLTLLQRKLQPAAMYEIKVRSIPDHYFKGFWSEWSPSYYFRTPEINNSSGLSLSYGPVSPIIRRLWNIFVRNQEKI

SEQ ID NO: 3187 - protein, 639 aa, Homo sapiens
MGAARSPPSAVPGPLLGLLLLLLGVLAPGGASLRLLDHRALVCSQPGLNCTVKNSTCLDDSWIHPRNLTPSSPKDLQIQLHFAHTQQGDLFPVAHIEWTLQTDASILYLEGAELSVLQLNTNERLCVRFEFLSKLRHHHRRWRFTFSHFVVDPDQEYEVTVHHLPKPIPDGDPNHQSKNFLVPDCEHARMKVTTPCMSSGSLWDPNITVETLEAHQLRVSFTLWNESTHYQILLTSFPHMENHSCFEHMHHIPAPRPEEFHQRSNVTLTLRNLKGCCRHQVQIQPFFSSCLNDCLRHSATVSCPEMPDTPEPIPDYMPLWVYWFITGISILLVGSVILLIVCMTWRLAGPGSEKYSDDTKYTDGLPAADLIPPPLKPRKVWIIYSADHPLYVDVVLKFAQFLLTACGTEVALDLLEEQAISEAGVMTWVGRQKQEMVESNSKIIVLCSRGTRAKWQALLGRGAPVRLRCDHGKPVGDLFTAAMNMILPDFKRPACFGTYVVCYFSEVSCDGDVPDLFGAAPRYPLMDRFEEVYFRIQDLEMFQPGRMHRVGELSGDNYLRSPGGRQLRAALDRFRDWQVRCPDWFECENLYSADDQDAPSLDEEVFEEPLLPPGTGIVKRAPLVREPGSQACLAFPVYL

SEQ ID NO: 3188 - protein, 359 aa, Homo sapiens
  SITE (323): Xaa equals any amino acid
  SITE (339): Xaa equals any amino acid
  SITE (345): Xaa equals any amino acid
  SITE (347): Xaa equals any amino acid
  SITE (354): Xaa equals any amino acid
  SITE (356): Xaa equals any amino acid
MGLMCGRRELLRLLQSGRRVHSVAGPSQWLGKPLTTRLLFPVAPCCCRPHYLFLAASGPRSLSTSAISFAEVQVQAPPVVAATPSPTAVPEVASGETADVVQTAAEQSFAELGLGSYTPVGLIQNLLEFMHVDLGLPWWGAIAACTVFARCLIFPLIVTGQREAARIHNHLPEIQKFSSRIREAKLAGDHIEYYKASSEMALYQKKHGIKLYKPLILPVTQAPIFISFFIALREMANLPVPSLQTGGLWWFQDLTVSDPIYILPLAVTATMWAVLELGAETGVQSSDLQWMRNVIRMMPLITLPITMHFPTAVFMYWLSSNLXFLVQVSCLRIPAVRTXLKIPQXGXHDLGPKXFXKPP

SEQ ID NO: 3189 - protein, 219 aa, Homo sapiens
MGMSSLKLLKYVLFFFNLLFWICGCCILGFGIYLLIHNNFGVLFHNLPSLTLGNVFVIVGSIIMVVAFLGCMGSIKENKCLLMSFFILLLIILLAEVTLAILLFVYEQKLNEYVAKGLTDSIHRYHSDNSTKAAWDSIQSFLQCCGINGTSDWTSGPPASCPSDRKVEGCYAKARLWFHSNFLYIGIITICVCVIEVLGMSFALTLNCQIDKTSQTIGL

SEQ ID NO: 3190 - protein, 245 aa, Homo sapiens; identical to SEQ ID NO: 3165

SEQ ID NO: 3191 - protein, 208 aa, Homo sapiens; identical to SEQ ID NO: 3182

SEQ ID NO: 3192 - protein, 557 aa, Homo sapiens
MMVVLLGATTLVLVAVAPWVLSAAAGGKNLKSPQKVEVDIIDDNFILRWNRSDESVGNVTFSFDYQKTGMDNWIKLSGCQNITSTKCNFSSLKLNVYEEIKLRIRAEKENTSSWYEVDSFTPFRKAQIGPPEVHLEAEDKAIVIHISPGTKDSVMWALDGLSFTYSLVIWKNSSGVEERIENIYSRHKIYKLSPETTYCLKVKAALLTSWKIGVYSPVHCIKTTVENELPPPENIEVSVQNQNYVLKWDYTYANMTFQVQWLHAFLKRNPGNHLYKWKQIPDCENVKTTQCVFPQNVFQKGIYLLRVQASDGNNTSFWSEEIKFDTEIQAFLLPPVFNIRSLSDSFHIYIGAPKQSGNTPVIQDYPLIYEIIFWENTSNAERKIIEKKTDVTVPNLKPLTVYCVKARAHTMDEKLNKSSVFSDAVCEKTKPGNTSKIWLIVGICIALFALPFVIYAAKVFLRCINYVFFPSLKPSSSIDEYFSEQPLKNLLLSTSEEQIEKCFIIENISTIATVEETNQTDEDHKKYSSQTSQDSGNYSNEDESESKTSEELQQDFV

SEQ ID NO: 3193 - protein, 337 aa, Homo sapiens; identical to SEQ ID NO: 3147

SEQ ID NO: 3194 - protein, 464 aa, Homo sapiens
MSSHGRVLSLLVAMLLSCCGLAAVCSITGYTHGMHTLAFMAAESLLVTVRTAHVILRYVIHLWDLNHEGTWEGKGTYVYYTDFVMELTLLSLDLMHHIHMLLFGNIWLSMASLVIFMQLRYLFHEVQRRIRRHKNYLRVVGNMEARFAVATPEELAVNNDDCAICWDSMQAARKLPCGHLFHNSCLRSWLEQDTSCPTCRMSLNIADNNRVREEHQGENLDENLVPVAAAEGRPRLNQHNHFLHFDGSRIASWLPSFSVEVMHTTNILGITQASNSQLNAMAHQIQEMFPQVPYHLVLQDLQLTRSVEITTDNILEGRIQVPFPTQRSDSIRPALNSPVERPSSDQEEGETSAQTERVPLDLSPRLEETLDFGEVEVEPSEVEDFEARGSRFSKSADERQRMLVQRKDELLQQARKRFLNKSSEDDAASESFLPSEGASSDPVTLRRRMLAAAAERRLQKQQTS

SEQ ID NO: 3195 - protein, 476 aa, Homo sapiens [sequence omitted]

SEQ ID NO: 3196 - protein, 468 aa, Homo sapiens
MAPPPARVHLGAFLAVTPNPGSAASGTEAAAATPSKVWGSSAGRIEPRGGGRGALPTSMGQHGPSARARAGRAPGPRPAREASPRLRVHKTFKFVVVGVLLQVVPSSAATIKLHDQSIGTQQWEHSPLGELCPPGSHRSERPGACNRCTEGVGYTNASNNLFACLPCTACKSDEEERSPCTTTRNTACQCKPGTFRNDNSAEMCRKCSTGCPRGMVKVKDCTPWSDIECVHKESGNGHNIWVILVVTLVVPLLLVAVLIVCCCIGSGCGGDPKCMDRVCFWRLGLLRGPGAEDNAHNEILSNADSLSTFVSEQQMESQEPADLTGVTVQSPGEAQCLLGPAEAEGSQRRRLLVPANGADPTETLMLFFDKFANIVPFDSWDQLMRQLDLTKNEIDVVRAGTAGPGDALYAMLMKWVNKTGRNASIHTLLDALERMEERHAKEKIQDLLVDSGKFIYLEDGTGSAVSLE

SEQ ID NO: 3197 - protein, 32 aa, Homo sapiens
PSPYRSLSSDTGFAQFLCLPGSCGHLNLQILL

SEQ ID NO: 3198 - protein, 32 aa, Homo sapiens
MGKKHHIGGTTRILTFLVVCILGSLLCSSRET

SEQ ID NO: 3199 - protein, 160 aa, Homo sapiens
MEGAELAGKILSTWLTLVLGFILLPSVFGVSLGISEIYMKILVKTLEWATIRIEKGTPKESILKNSASVGIIQRDESPMEKGLSGLRGRDFELSDVFYFSKKGLEAIVEDEVTQRFSSEELVSWNLLTRTNVNFQYISLRLTMVWVLGVIVRYCVLLPLR

SEQ ID NO: 3200 - protein, 272 aa, Homo sapiens
MKGKKGIVAASGSETEDEDSMDIPLDLSSSAGSGKRRRRGNLPKESVQILRDWLYEHRYNAYPSEQEKALLSQQTHLSTLQVCNWFINARRRLLPDMLRKDGKDPNQFTISRRGAKISETSSVESVMGIKNFMPALEETPFHSCTAGPNPTLGRPLSPKPSSPGSVLARPSVICHTTVTALKDVPFSLCQSVGVGQNTDIQQIAAKNFTDTSLMYPEDTCKSGPSTNTQSGLFNTPPPTPPDLNQDFSGFQLLVDVALKRAAEMELQAKLTA

SEQ ID NO: 3201 - protein, 555 aa, Homo sapiens
MAAAAWLQVLPVILLLLGAHPSPLSFFSAGPATVAAADRSKWHIPIPSGKNYFSFGKILFRNTTIFLKFDGEPCDLSLNITWYLKSADCYNEIYNFKAEEVELYLEKLKEKRGLSGKYQTSSKLFQNCSELFKTQTFSGDFMHRLPLLGEKQEAKENGTNLTFIGDKTAMHEPLQTWQDAPYIFIVHIGISSSKESSKENSLSNLFTMTVEVKGPYEYLTLEDYPLMIFFMVMCIVYVLFGVLWLAWSACYWRDLLRIQFWIGAVIFLGMLEKAVFYAEFQNIRYKGESVQGALILAELLSAVKRSLARTLVIIVSLGYGIVKPRLGVTLHKVVVAGALYLLFSGMEGVLRVTGAQTDLASLAFIPLAFLDTALCWWIFISLTQTMKLLKLRRNIVKLSLYRHFTNTLILAVAASIVFIIWTTMKFRIVTCQSDWRELWVDDAIWRLLFSMILFVIMVLWRPSANNQRFAFSPLSEEEEEDEQKEPMLKESFEGMKMRSTKQEPNGNSKVNKAQEDDLKWVEENVPSSVTDVALPALLDSDEERMITHFERSKME

SEQ ID NO: 3202 - protein, 418 aa, Homo sapiens [sequence omitted]

SEQ ID NO: 3203 - protein, 14 aa, Homo sapiens
SFIFGPLWPLHIFY

SEQ ID NO: 3204 - protein, 128 aa, Homo sapiens
MGCAFINLCILASQHAWAQLTFWEASQLYLLFLSLTLATVNARWLEPRTTAAMWALQTVEKERGLGGEVPGSHQGPDPYRQLREKDPKYSALRQNFFRYHGLSSLCNLGCVLSNGLCLAGLALEIRSL

SEQ ID NO: 3205 - protein, 110 aa, Homo sapiens
MCVCVCLCVCVSVCLYVYGSMCMKLVRKNIKKEQGDSDSHTVGGTVVCRKLLSLQQTMGNSGSETVQHLWESCLHSHLRTWRMQFARHTREGLHCFLLFNLMYTSFGGIK

SEQ ID NO: 3206 - protein, 295 aa, Homo sapiens
MLQGPGSLLLLFLASHCCLGSARGLFLFGQPDFSYKRSNCKPIPANLQLCHGIEYQNMRLPNLLGHETMKEVLEQAGAWIPLVMKQCHPDTKKFLCSLFAPVCLDDLDETIQPCHSLCVQVKDRCAPVMSAFGFPWPDMLECDRFPQDNDLCIPLASSDHLLPATEEAPKVCEACKNKNDDDNDIMETLCKNDFALKIKVKEITYINRDTKIILETKSKTIYKLNGVSERDLKKSVLWLKDSLQCTCEEMNDINAPYLVMGQKQGGELVITSVKRWQKGQREFKRISRSIRKLQC

SEQ ID NO: 3207 - protein, 63 aa, Homo sapiens [sequence omitted]

SEQ ID NO: 3208 - protein, 109 aa, Homo sapiens
MIKKDKYHKKVFLFGWFFCLFVFFLRLSLSLLPKLECNLGSLQPPPPRFQRFSCLSLLNSWDYRRPPPHLANFCVVSRGGVSSCWPGWSRTPDLMIRLPRPPRVLGLQA

SEQ ID NO: 3209 - protein, 145 aa, Homo sapiens
MSIQHFRVALIPFFAAFCLPVFAHPETLVKVKDAEDQLGARVGYIELDLNSGKILESFRPEERFPMMSTFKVLLCGAVLSRIDAGQEQLGRRIHYSQNDLVEYSPVTEKHLTDGMTVRELCSAAITMSDNTAANLLLTTIGGPKS

SEQ ID NO: 3210 - protein, 41 aa, Homo sapiens
MKTVKMFTTWCTRHIALLLWQLESSFTKSYLADMTHKQKKH

SEQ ID NO: 3211 - protein, 140 aa, Homo sapiens
PRVRPRVRGRWVRPTRPSTHASAHASAHASEQRDLHTETPSWAPGTMAPLKMLALVTLLLGASLQHIHAARGTNVGRECCLEYFKGAIPLRKLKTWYQTSEDCSRDAIVFVTVQGRAICSDPNNKRVKNAVKYLQSLERS

SEQ ID NO: 3212 - protein, 102 aa, Homo sapiens
MFAMYIISGLTGFIGLNSIAVLCNLVMGLALIFLCTWAYVKYSGEFREIGTVIDQIAETLWEQVLKPLGDNLMEENIRQSVTNSIKAGLTDQVSHHARLKTD

SEQ ID NO: 3213 - protein, 83 aa, Homo sapiens [sequence omitted]

SEQ ID NO: 3214 - protein, 49 aa, Homo sapiens
MHERPWTFFCSLLALHGAMGLGLGGSSPSQFISSSRASPSFVSETGFKM

SEQ ID NO: 3215 - protein, 462 aa, Homo sapiens [sequence omitted]

SEQ ID NO: 3216 - protein, 55 aa, Homo sapiens
  SITE (27): Xaa equals any amino acid
  SITE (37): Xaa equals any amino acid
  SITE (52): Xaa equals any amino acid
MQLLLLTCLLQLIMVTNKAIASQISQXKHFFHCILVXVCPNSINVSYHVLDXILH

SEQ ID NO: 3217 - protein, 54 aa, Homo sapiens
MQLLLLTCLLQLIMVTNKAIASQISQIKHFFHCILVVVCPNSSMYLIMSGSILH

SEQ ID NO: 3218 - protein, 131 aa, Homo sapiens [sequence omitted]

SEQ ID NO: 3219 - protein, 46 aa, Homo sapiens
TQCVEKTANLFGSTLTPSSVAMWGQGRILNYPHGLKWKSWDSGKLA

SEQ ID NO: 3220 - protein, 6 aa, Homo sapiens
MVFCDT

SEQ ID NO: 3221 - protein, 89 aa, Homo sapiens
MRNVNSLSAINPVSLLLMHRSRALKRAVFLLTLPFSCLPGLCLSHSPIQRQEVEKGWARWLTPVIPALWEDEVGGSPEVRSSRPTWPTW

SEQ ID NO: 3222 - protein, 130 aa, Homo sapiens [sequence omitted]

SEQ ID NO: 3223 - protein, 244 aa, Homo sapiens
MYVAIQAVLSLYASGRTTGIVMDSGDGVTHTVPIYEGYALPHAILRLDLAGRDLTDYLMKILTERGYSFTTTAEREIVRDIKEKLCYVALDFEQEMATAASSSSLEKSYELPDGQVITIGNERFRCPEALFQPSFLGMESCGIHETTFNSIMKCDVDIRKDLYANTVLSGGTTMYPGIADRMQKEITALAPSTMKIKIIAPPERKYSVWIGGSILASLSTFQQMWISKQEYDESGPSIVHRKCF

SEQ ID NO: 3224 - protein, 112 aa, Homo sapiens
MQDTGSVVPLHWFGFGYAALVASGGIIGYVKAGSVPSLAAGLLFGSLAGLGAYQLSQDPRNVWVFLATSGTLAGIMGMRFYHSGKFMPAGLIAGASLLMVAKVGVSMFNRPH

SEQ ID NO: 3225 - protein, 40 aa, Homo sapiens
MCYQDETVWVAFLFVFCFVFVFVFVFSCRSQRGNFLRLYT

SEQ ID NO: 3226 - protein, 45 aa, Homo sapiens
MRWTCLLGTPGHPLFFLLCAWSIMSTPADPWKRKCLCCRVLHGHE

SEQ ID NO: 3227 - protein, 359 aa, Homo sapiens
MTLESIMACCLSEEAKEARRINDEIERQLRRDKRDARRELKLLLLGTGESGKSTFIKQMRIIHGSGYSDEDKRGFTKLVYQNIFTAMQAMIRAMDTLKIPYKYEHNKAHAQLVREVDVEKVSAFENPYVDAIKSLWNDPGIQECYDRRREYQLSDSTKYYLNDLDRVADPAYLPTQQDVLRVRVPTTGIIEYPFDLQSVIFRMVDVGGQRSERRKWIHCFENVTSIMFLVALSEYDQVLVESDNENRMEESKALFRTIITYPWFQNSSVILFLNKKDLLEEKIMYSHLVDYFPEYDGPQRDAQAAREFILKMFVDLNPDSDKIIYSHFTCATDTENIRFVFAAVKDTILQLNLKEYNLV

SEQ ID NO: 3228 - protein, 419 aa, Homo sapiens
  SITE (3): Xaa equals any amino acid
MHXLGFFSVACSLLAAALLPGPREAPAAAAAFESGLDLSDAEPDAGEATAYASKDLEEQLRSVSSVDELMTVLYPEYWKMYKCQLRKGGWQHNREQANLNSRTEETIKFAAAHYNTEILKSIDNEWRKTQCMPREVCIDVGKEFGVATNTFFKPPCVSVYRCGGCCNSEGLQCMNTSTSYLSKTLFEITVPLSQGPKPVTISFANHTSCRCMSKLDVYRQVHSIIRRSLPATLPQCQAANKTCPTNYMWNNHICRCLAQEDFMFSSDAGDDSTDGFHDICGPNKELDEETCQCVCRAGLRPASCGPHKELDRNSCQCVCKNKLFPSQCGANREFDENTCQCVCKRTCPRNQPLNPGKCACECTESPQKCLLKGKKFHHQTCSCYRRPCTNRQKACEPGFSYSEEVCRCVPSYWKRPQMS

SEQ ID NO: 3229 - protein, 456 aa, Homo sapiens
  SITE (199): Xaa equals any amino acid
MSLPLIVTLSTISIILLAAMITIAVKCKRENKEIRTYNCRIAEYSHPQLGGGKGKKKKINKNDIMLVQSEVEERNAMNVMNVVSSPSLATSPMYFDYQTRLPLSSPRSEVMYLKPASNNLTVPQGHAGCHTSFTGQGTNASETPATRMSIIQTDNFPAEPNYMGSRQQFVQSSSTFKDPERASLRDSGHGDSDQADSDXDTNKGSCCDMSVREALKMKTTSTKSQPLEQEPEECVNCTDECRVLGHSDRCWMPQFPAANQAENADYRTNLFVPTVEANVETETYETVNPTGKKTFCTFGKDKREHTILIANVKPYLKAKRALSPLLQEVPSASSSPTKACIEPCTSTKGSLDGCEAKPGALAEASSQYLPTDSQYLSPSKQPRDPPFMASDQMARVFADVHSRASRDSSEMGAVLEQLDHPNRDLGRESVDAEEVVREIDKLLQDCRGNDPVAVRK

SEQ ID NO: 3230 - protein, 13 aa, Homo sapiens
MLLIYVFLFCWSF

SEQ ID NO: 3231 - protein, 229 aa, Homo sapiens
  SITE (175): Xaa equals any amino acid
MGDKIWLPFPVLLLAALPPVLLPGAAGFTPSLDSDFTFTLPAGQKECFYQPMPLKASLEIEYQVLDGAGLDIDFHLASPEGKTLVFEQRKSDGVHTVETEVGDYMFCFDNTFSTISEKVIFFELILDNMGEQAQEQEDWKKYITGTDILDMKLEDILESINSIKSRLSKSGHIQXLLRAFEARDRNIQESNFDRVNFWSMVNLVVMVVVSAIQVYMLKSLFEDKRKSRT

SEQ ID NO: 3232 - protein, 255 aa, Homo sapiens
MSGKVTKPKEEKDASKVLDDAPPGTQEYIMLRQDSIQSAELKKKESPFRAKCHEIFCCPLKQVHHKENTEPEEPQLKGIVTKLYSRQGYHLQLQADGTIDGTKDEDSTYTLFNLIPVGLRVVAIQGVQTKLYLAMNSEGYLYTSELFTPECKFKESVFENYYVTYSSMIYRQQQSGRGWYLGLNKEGEIMKGNHVKKNKPAAHFLPKPLKVAMYKEPSLHDLTEFSRSGSGTPTKSRSVSGVLNGGKSMSHNEST

SEQ ID NO: 3233 - protein, 305 aa, Homo sapiens
MGIQTSPVLLASLGVGLVTLLGLAVGSYLVRRSRRPQVTLLDPNEKYLLRLLDKTTVSHNTKRFRFALPTAHHTLGLPVGKHIYLSTRIDGSLVIRPYTPVTSDEDQGYVDLVIKVYLKGVHPKFPEGGKMSQYLDSLKVGDVVEFRGPSGLLTYTGKGHFNIQPNKKSPPEPRVAKKLGMIAGGTGITPMLQLIRAILKVPEDPTQCFLLFANQTEKDIILREDLEELQARYPNRFKLWFTLDHPPKDWAYSKGFVTADMIREHLPAPGDDVLVLLCGPPPMVQLACHPNLDKLGYSQKMRFTY

SEQ ID NO: 3234 - protein, 33 aa, Homo sapiens
MLQPLNLPYFVSVLLICCCLKKKCFFSMDEARP

SEQ ID NO: 3235 - protein, 229 aa, Homo sapiens
MGDKIWLPFPVLLLAALPPVLLPGAAGFTPSLDSDFTFTLPAGQKECFYQPMPLKASLEIEYQVLDGAGLDIDFHLASPEGKTLVFEQRKSDGVHTVETEVGDYMFCFDNTFSTISEKVIFFELILDNMGEQAQEQEDWKKYITGTDILDMKLEDILESINSIKSRLSKSGHIQTLLRAFEARDRNIQESNFDRVNFWSMVNLVVMVVVSAIQVYMLKSLFEDKRKSRT

SEQ ID NO: 3236 - protein, 80 aa, Homo sapiens
MVFLVDSKSDTGFVVVKNVLFGVIRLVADTRMVGLVAMVGIGVGSGVVGLGAGSEVGSGVVGLGAGSEVGSGVVGLGVGS

SEQ ID NO: 3237 - protein, 206 aa, Homo sapiens
MLPPAIHFYLLPLACILMKSCLAFKNDATEILYSHVVKPVPAHPSSNSTLNQARNGGRHFSNTGLDRNTRVQVGCRELRSTKYISDGQCTSISPLKELVCAGECLPLPVLPNWIGGGYGTKYWSRRSSQEWRCVNDKTRTQRIQLQCQDGSTRTYKITVVTACKCKRYTRQHNESSHNFESMSPAKPVQHHRERKRASKSSKHSMS

SEQ ID NO: 3238 - protein, 158 aa, Homo sapiens
MAAASAGATRLLLLLLMAVAAPSRARGSGCRAGTGARGAGAEGREGEACGTVGLLLEHSFEIDDSANFRKRGSLLWNQQDGTLSLSQRQLSEEERGRLRDVAASYLDCGATRACGPLLCATLPVSLFKNIDDTLKCVNVLKSYSFQQPKATVVLARRS

SEQ ID NO: 3239 - protein, 214 aa, Homo sapiens
MKYPHLVAGALAASAPVLAVAGLGDSNQFFRDVTADFEGQSPKCTQGVREAFRQIKDLFLQGAYDTVRWEFGTCQPLSDEKDLTQLFMFARNAFTVLAMMDYPYPTDFLGPLPANPVKGWSTTPRAPSTATTSTGSTTAVLTPLAAAPAPTPGPGTTRSQSRQQHHLLQREPGPLGRGRDSEEPECLSHRRHHPGGSAPPRPQSLPPRRSCFRG

SEQ ID NO: 3240 - protein, 472 aa, Homo sapiens [sequence omitted]

SEQ ID NO: 3241 - protein, 175 aa, Homo sapiens; identical to SEQ ID NO: 3085

SEQ ID NO: 3242 - protein, 467 aa, Homo sapiens
MRPQELPRLAFPLLLLLLLLLPPPPCPAHSATRFDPTWESLDARQLPAWFDQAKFGIFIHWGVFSVPSFGSEWFWWYWQKEKIPKYVEFMKDNYPPSFKYEDFGPLFTAKFFNANQWADIFQASGAKYIVLTSKHHEGFTLWGSEYSWNWNAIDEGPKRDIVKELEVAIRNRTDLRFGLYYSLFEWFHPLFLEDESSSFHKRQFPVSKTLPELYELVNNYQPEVLWSDGDGGAPDQYWNSTGFLAWLYNESPVRGTVVTNDRWGAGSICKHGGFYTCSDRYNPGHLLPHKWENCMTIDKLSWGYRREAGISDYLTIEELVKQLVETVSCGGNLLMNIGPTLDGTISVVFEERLRQMGSWLKVNGEAIYETHTWRSQNDTVTPDVWYTSKPKEKLVYAIFLKWPTSGQLFLGHPKAILGATEVKLLGHGQPLNWISLEQNGIMVELPQLTIHQMPCKWGWALALTNVI

SEQ ID NO: 3243 - protein, 19 aa, Homo sapiens
CEEGEHLGDYHGAGMLRAL

SEQ ID NO: 3244 - protein, 88 aa, Homo sapiens
  SITE (82): Xaa equals any amino acid
MGACSYRPSWWMCVFIMWSPCHLLPYDLGLMLWGAGGAADVVFTEQGFPVSHGEGLGPLVRHSCRGSVEGSFNCPCSKQKLXVVPLIP

SEQ ID NO: 3245 - protein, 168 aa, Homo sapiens
MKELSMLSLICSCFYPEPRNINIYTYDDMEVKQINKRASGQAFELILKPPSPISEAPRTLASPKKKDLSLEEIQKKLEAAEERRKSQEAQVLKQLAEKREHEREVLQKALEENNNFSKMAEEKLILKMEQIKENREANLAAIIERLQEKERHAAEVRRNKELQVELSG

SEQ ID NO: 3246 - protein, 127 aa, Homo sapiens
MYRHKNSWRLGLKYPPSSKEETQVPKTLISGLPGRKSSSRVGEKLQSAHKMPLSPGLLLLLLSGATATAALPLEGGPTGRDSEVSTVPTWPHASPLSVSCWLFGLHGVCVCTCVALHSLDRTHGSTL

SEQ ID NO: 3247 - protein, 170 aa, Homo sapiens
MLSARFSGNLLVSLLGTWSDTSSGGPARAYPVGGLCYYLSPPESFGSVLEDPVHAVVYIVFMLGSCAFFSKTWIEVSGSSAKDVAKQLKEQQMVMRGHRETSMVHELNRYIPTAAAFGGLCIGALSVLADFLGAIGSGTGILLAVTIIYQYFEIFVKEQSEVGSMGALLF

SEQ ID NO: 3248 - protein, 128 aa, Homo sapiens [sequence omitted]

SEQ ID NO: 3249 - protein, 420 aa, Homo sapiens
MVSKALLRLVSAVNRRRMKLLLGIALLAYVASVWGNFVNMRSIQENGELKIESKIEEMVEPLREKIRDLEKSFTQKYPPVKFLSEKDRKRILITGGAGFVGSHLTDKLMMDGHEVTVVDNFFTGRKRNVEHWIGHENFELINHDVVEPLYIEVDQIYHLASPASPPNYMYNPIKTLKTNTIGTLNMLGLAKRVGARLLLASTSEVYGDPEVHPQSEDYWGHVNPIGPRACYDEGKRVAETMCYAYMKQEGVEVRVARIFNTFGPRMHMNDGRVVSNFILQALQGEPLTVYGSGSQTRAFQYVSDLVNGLVALMNSNVSSPVNLGNPEEHTILEFAQLIKNLVGSGSEIQFLSEAQDDPQKRKPDIKKAKLMLGWEPVVPLEEGLNKAIHYFRKELEYQANNQYIPKPKPARIKKGRTRHS

SEQ ID NO: 3250 - protein, 42 aa, Homo sapiens
MPLLCLCLLPTPTMAVSTIRVSEDTGRLPTLLRTCTETILPQ

SEQ ID NO: 3251 - protein, 70 aa, Homo sapiens
MPWCPCWTVLTSKPFLSMLPACSAWPRSTFSSRTSVWKSLRSPRLSWRNTTRLQCFSPSNSCSGMSYFAS

SEQ ID NO: 3252 - protein, 40 aa, Homo sapiens
  SITE (40): Xaa equals any amino acid
MLPLLAALLAAACPLPPVRGGAADAPGLLGVPSNASVNAX

SEQ ID NO: 3253 - protein, 76 aa, Homo sapiens
MGWFFLMAVMYITGAGLYAARIPERFFPGKFDIWFQSHQIFHVLVVAAAFVHFYGVSNLQEFRYGLEGGCTDDTLL

SEQ ID NO: 3254 - protein, 98 aa, Homo sapiens [sequence omitted]

SEQ ID NO: 3255 - protein, 205 aa, Homo sapiens
MGTAGAMQLCWVILGFLLFRGHNSQPTMTQTSSSQGGLGGLSLTTEPVSSNPGYIPSSEANRPSHLSSTGTPGAGVPSSGRDGGTSRDTFQTVPPNSTTMSLSMREDATILPSPTSETVLTVAAFGVISFIVILVVVVIILVGVVSLRFKCRKSKESEDPQKPGSSGLSESCSTANGEKDSITLISMKNINMNNGKQSLSAEKVL

SEQ ID NO: 3256 - protein, 93 aa, Homo sapiens
MNYCAWLLVSLNSTLHSTLIWFLSLLLCKNFCGQSFSNFHIAVSVVILPDLSGEILKIDYSVFLTHFIYFLSRIPYSWFSCHLCSGCSLCLLC

SEQ ID NO: 3257 - protein, 177 aa, Homo sapiens
MRALEGPGLSLLCLVLALPALLPVPAVRGVAETPTYPWRDAETGERLVCAQCPPGTFVQRPCRRDSPTTCGPCPPRHYTQFWNYLERCRYCNVLCGEREEEARACHATHNRACRCRTGFFAHAGFCLEHASCPPGAGVIAPGRAGRGEGPPGVVAGGVAGVRLLVPALHPELGHQFP

SEQ ID NO: 3258 - protein, 11 aa, Homo sapiens
MLECLLLPAQL

SEQ ID NO: 3259 - protein, 212 aa, Homo sapiens
  SITE (123): Xaa equals any amino acid
MDYLLMIFSLLFVACQGAPETAVLGAELSAVGENGGEKPTPSPPWRLRRSKRCSCSSLMDKECVYFCHLDIIWVNTPEHVVPYGLGSSRSKRALENLLPTKATDRENRCQCASQKDKKCWNFXQAGKELRAEDIMEKDWNNHKKGKDCSKLGKKCIYQQLVRGRKIRRSSEEHLRQTRSETMRNSVKSSFHDPKLKGKPSRERYVTHNRAHW

SEQ ID NO: 3260 - protein, 54 aa, Homo sapiens
MLVTAYLAFVGLLASCLGLELSRCRAKPPGRPAAIPPSFGFNWTSISLLPGPGS

SEQ ID NO: 3261 - protein, 124 aa, Homo sapiens
TLRIYNQVMILTDPEWQAVLLSLKVSSLAVLFSLPFGIFFAWLLVRCTFPGKALLDSVLHLPLVLPPVVVGYLLLVSMGRRGFIGERLYDWFGITFAFSWRGAVLAAAVMSFPLMVRAIRLALE

SEQ ID NO: 3262 - protein, 112 aa, Homo sapiens
CLGIEFMQTKKNEIWVGIFLLAALLAALFVCLKAANVTSIRTEPTYTLYATFDNIGGLKARSPVSIGGVVVGRVADITLDPKTYLPRVTLEIEQRYNHIPDTSSLSIRTSGL

SEQ ID NO: 3263 - protein, 55 aa, Homo sapiens
MGILNRGAACCLLTAWKGKILCLYFSVFFSVFSVSSFAQTCEHQRADGFQTRTLP

SEQ ID NO: 3264 - protein, 71 aa, Homo sapiens [sequence omitted]

SEQ ID NO: 3265 - protein, 199 aa, Homo sapiens
MQLCWVILGFLLFRGHNSQPTMTQTSSSQGGLGGLSLTTEPVSSNPGYIPSSEANRPSHLSSTGTPGAGVPSSGRDGGTSRDTFQTVPPNSTTMSLSMREDATILPSPTSETVLTVAAFGVISFIVILVVVVIILVGVVSLRFKCRKSKESEDPQKPGSSGLSESCSTANGEKDSITLISMKNINMNNGKQSLSAEKVL

SEQ ID NO: 3266 - protein, 235 aa, Homo sapiens [sequence omitted]

SEQ ID NO: 3267 - protein, 12 aa, Homo sapiens
MSGIWGFCLFLL

SEQ ID NO: 3268 - protein, 235 aa, Homo sapiens
MDPARPLGLSILLLFLTEAALGDAAQEPTGNNAEICLLPLDYGPCRALLLRYYYDRYTQSCRQFLYGGCEGNANNFYTWEACDDACWRIEKVPKVCRLQVSVDDQCEGSTEKYFFNLSSMTCEKFFSGGCHRNRIENRFPDEATCMGFCAPKKIPSFCYSPKDEGLCSANVTRYYFNPRYRTCDAFTYTGCGGNDNNFVSREDCKRACAKALKKKKKMPKLRFASRIRKIRKKQF

SEQ ID NO: 3269 - protein, 102 aa, Homo sapiens
MGSTVPRSASVLLLLLLLRRAEQPCGAELTFELPDNAKQCFHEEVEQGVKFSLDYQVITGGHYDVDCYVEDPQGTPSTEKRRSSTTASRTGLKSRAFISLLQ

SEQ ID NO: 3270 - protein, 36 aa, Homo sapiens
MFILWACGLSPPLSSSPSRSFLCEGRSAVMFSGKPS

SEQ ID NO: 3271 - protein, 25 aa, Homo sapiens
MLGNCAACPVGWWLHYVLGCACGSI

SEQ ID NO: 3272 - protein, 79 aa, Homo sapiens
MAPLLLQLAVLGAALAAAALVLISIVAFTTATKMPALHRHEEEKFFLNAKGQKETLPSIWDSPTKQLSVVVPSYNEEKR

SEQ ID NO: 3273 - protein, 189 aa, Homo sapiens
  SITE (132): Xaa equals any amino acid
  SITE (163): Xaa equals any amino acid
  SITE (168): Xaa equals any amino acid
MAGPATQSPMKLMALQLLLWHSALWTVQEATPLGPASSLPQSFLLKCLEQVRKIQGDGAALQEKLCATYKLCHPEELVLLGHSLGIPWAPLSSCPSQALQLAGCLSQLHSGLFLYQGLLQALEGSPPSWVPXWTHCSWTSPTLPPPSGSRWKNWEWPLPCSPXRVPCXLRLCFPAPGRRGPSCLPSAEL

SEQ ID NO: 3274 - protein, 114 aa, Homo sapiens
MFCPLKLILLPVLLDYSLGLNDLNVSPPELTVHVGDSALMGCVFQSTEDKCIFKIDWTLSPGEHAKDEYVLYYYSNLSVPIGRFQNRVHLMGDILCNDGSLLLQDVQEADQGNL

SEQ ID NO: 3275 - protein, 325 aa, Homo sapiens
CRKLAVAHPLLLLRHLPMIAALLHGRTHLNFQEFRQQNHLSCFLHVLGLLELLQPHVFRSEHQGALWDCLLSFIRLLLNYRKSSRHLAAFINKFVQFIHKYITYNAPAAISFLQKHADPLHDLSFDNSDLVMLKSLLAGLSLPSRDDRTDRGLDEEGEEESSAGSLPLVSVSLFTPLTAAEMAPYMKRLSRGQTVEDLLEVLSDIDEMSRRRPEILSFFSTNLQRLMSSAEECCRNLAFSLALRSMQNSPSIAAAFLPTFMYCLGSQDFEVVQTALRNLPEYALLCQEHAAVLLHRAFLVGMYGQMDPSAQISEALRILHMEAVM

SEQ ID NO: 3276 - protein, 382 aa, Homo sapiens
MLLLLLLLPLLWGTKGMEGDRQYGDGYLLQVQELVTVQEGLCVHVPCSFSYPQDGWTDSDPVHGYWFRAGDRPYQDAPVATNNPDREVQAETQGRFQLLGDIWSNDCSLSIRDARKRDKGSYFFRLERGSMKWSYKSQLNYKTKQLSVFVTALTHRPDILILGTLESGHSRNLTCSVPWACKQGTPPMISWIGASVSSPGPTTARSSVLTLTPKPQDHGTSLTCQVTLPGTGVTTTSTVRLDVSYPPWNLTMTVFQGDATASTALGNGSSLSVLEGQSLRLVCAVNSNPPARLSWTRGSLTLCPSRSSNPGLLELPRVHVRDEGEFTCRAQNAQGSQHISLSLSLQNEGTGTSRPVSQVTLAAVAELEPQPWPSCPSASSSS

SEQ ID NO: 3277 - protein, 238 aa, Homo sapiens [sequence omitted]

SEQ ID NO: 3278 - protein, 36 aa, Homo sapiens
MFQTMSWFCALLARCFLLLLKAYSRTWSHVLKANGL

SEQ ID NO: 3279 - protein, 27 aa, Homo sapiens
MGQKFFQTVPWALTWVVLVIQQKHCTN

SEQ ID NO: 3280 - protein, 65 aa, Homo sapiens
MGTFSLSLFGLMGVAFGMNLESSLEEDHRIFWLITGIMFMGSGLIWRRLLSFLGRQLEAPLPPMV

SEQ ID NO: 3281 - protein, 28 aa, Homo sapiens
MWPFRILLRVWFIIVSFVLLVNIHLQQF

SEQ ID NO: 3282 - protein, 267 aa, Homo sapiens
MARRSAFPAAALWLWSILLCLLALRAEAGPPQEESLYLWIDAHQARVLIGFEEDILIVSEGKMAPFTHDFRKAQQRMPAIPVNIHSMNFTWQAAGQAEYFYEFLSLRSLDKGIMADPTVNVPLLGTVPHKASVVQVGFPCLGKQDGVAAFEVDVIVMNSEGNTILQTPQNAIFFKTCQQAECPGGCRNGGFCNERRICECPDGFHGPHCEKALCTPRCMNGGLCVTPGFCICPPGFYGVNCDKANCSTTCFNGGTCFYPGKCICLQD

SEQ ID NO: 3283 - protein, 84 aa, Homo sapiens [sequence omitted]

SEQ ID NO: 3284 - protein, 263 aa, Homo sapiens
MQKVKGQVPSHLHGSTPIHLGATAGMRLLRLQNETAANEVLESIQSYFKSQPFDFRGAQIISGQEEGVYGWITANYLMGNFLEKNLWHMWVHPHGVETTGALDLGGASTQISFVAGEKMDLNTSDIMQVSLYGYVYTLYTHSFQCYGRNEAEKNFWQCSCRILLPKTISPIPVTLGIIASASPWAMYLIACALWTRGQKVITPMMSSLLKELGTHLCVRRKWLPYLTSKLAMIKKPVLLMGFISQRLKGHLWLLQDSTTQPVL

SEQ ID NO: 3285 - protein, 261 aa, Homo sapiens
MQLVILRVTIFLPWCFAVPVPPAADHKGWDFVEGYFHQFFLTEKESPLLTQETQTQLLQQFHRNGTDLLDMQMHALLHQPHCGVPDGSDTSISPGRCKWNKHTLTYRIINYPHDMKPSAVKDSIYNAVSIWSNVTPLIFQQVQNGDADIKVSFWQWAHEDGWPFDGPGGILGHAFLPNSGNPGVVHFDKNEHWSASDTGYNLFLVATHEIGHSLGLQHSGNQSSIMYPTYWYHDPRTFQLSADDIQRIQHLYGEKCSSDIP

SEQ ID NO: 3286 - protein, 193 aa, Homo sapiens [sequence omitted]

SEQ ID NO: 3287 - protein, 1 aa, Homo sapiens
F

SEQ ID NO: 3288 - protein, 12 aa, Homo sapiens
LFFHAVASVPCI

SEQ ID NO: 3289 - protein, 136 aa, Homo sapiens
MKKQYDSFTFTASKNGTYKFCFSNEFSTFTHKTVYFDFQVGEDPPLFPSENRVSALTQMESACVSIHEALKSVIDYQTHFRLREAQGRSRAEDLNTRVAYWSVGEALILLVVSIGQVFLLKSFFSDKRTTTTRVGS

SEQ ID NO: 3290 - protein, 246 aa, Homo sapiens
MLPLVLHWFFIEWYSGKKSSSALFQHITALFECSMAAIITLLVSDPVGVLYIRSCRVLMLSDWYTMLYNPSPDYVTTVHCTHEAVYPLYTIVFIYYAFCLVLMMLLRPLLVKKIACGLGKSDRFKSIYAALYFFPILTVLQAVGGGLLYYAFPYIILVLSLVTLAVYMSASEIENCYDLLVRKKRLIVLFSHWLLHAYGIISISRVDKLEQDLPLLALVPTPALFYLFTAKFTEPSRILSEGANGH

SEQ ID NO: 3291 - protein, 95 aa, Homo sapiens
MKLLMVLMLAALLLHCYADSGCKLLEDMVEKTINSDISIPEYKELLQEFIDSDAAAEAMGKFKQCFLNQSHRTLKNFGLMMHTVYDSIWCNMKSN

SEQ ID NO: 3292 - protein, 174 aa, Homo sapiens
MKTLFLGVTLGLAAALSFTLEEEDITGTWYVKAMVVDKDFPEDRRPRKVSPVKVTALGGGKLEATFTFMREDRCIQKKILMRKTEEPGKYSACEPLPHSHPHPPPPPTPVHQPPQVESAQAALLPGPQLCPPPRRGWPLLPGGLVALTSDTGCDRLVRSRDGPDHACPLGGPSH

SEQ ID NO: 3293 - protein, 40 aa, Homo sapiens
MSSSHLLLTPCRVAPPYPHLFSSCSPPGMVLDGSPKGAGM

SEQ ID NO: 3294 - protein, 90 aa, Homo sapiens
MKLSVCLLLVTLALCCYQANAEFCPALVSELLDFFFISEPLFKLSLAKFDAPPEAVAAKLGVKRCTDQMSLQKRSLIAEVLVKILKKCSV

SEQ ID NO: 3295 - protein, 24 aa, Homo sapiens
MVELWSQRKWVSSAQSCCFYFSHF

SEQ ID NO: 3296 - protein, 128 aa, Homo sapiens
  SITE (23): Xaa equals any amino acid
  SITE (24): Xaa equals any amino acid
  SITE (25): Xaa equals any amino acid
MPGSVLFWFLVFGSGFHCVAQAXXXWCHSHCDLDLLDSSDPPASASQSSGDHRHEPPHPAITPGFSVGGFWFGDIQSLKPGGCGQGLHFMKLPSKLRSLGPQDPPNWPGTWCHVLLPPGYAPSHRCPA

SEQ ID NO: 3297 - protein, 279 aa, Homo sapiens
MKKELPVDSCLPRSLELHPQKMDPKRQHIQLLSSLTECLTVDPLSASVWRQLYPKHLSQSSLLLEHLLSSWEQIPKKVQKSLQETIQSLKLTNQELLRKGSSNNQDVVSCDMACKGLLQQVQGPRLPWTRLLLLLLVFAVGFLCHDLRSHSSFQASLTGRLLRSSGFLPASQQACAKLYSYSLQGYSWLGETLPLWGSHLLTVVRPSLQLAWAHTNATVSFLSAHCASHLAWFGDSLTSLSQRLQIQLPDSVNQLLRYLRELPLLFHQNVLLATVAPLA

SEQ ID NO: 3298 - protein, 138 aa, Homo sapiens
MSGFGATLAVGLTIFVLSVVTIIICFTCSCCCLYKTCRRPRPVVTTTTSTTVVHAPYPQPPSVPPSYPGPSYQGYHTMPPQPGMPAAPYPMQYPPPYPAQPMGPPAYHETLAGGAAAPYPASQPPYNPAYMDAPKAAL

SEQ ID NO: 3299 - protein, 83 aa, Homo sapiens
MRLSVCLLMVSLALCCYQAHALVCPAVASEITVFLFLSDAAVNLQVAKLNPPPEALAAKLEVKHCTDQISFKKRLSLKKSWWK

SEQ ID NO: 3300 - protein, 28 aa, Homo sapiens
MQAPEPRRPVVLASGCPGLLSLRLALFY

SEQ ID NO: 3301 - protein, 93 aa, Homo sapiens
  SITE (64): Xaa equals any amino acid
VIFHCVHSPVGGHLDHFPFGIIRNNIAMNINVKVCFIVFVFVFLFFIVVVFEMGSCSCHPSWSXSGMILAHCNLQLPGSSNSPASASRVAGII

SEQ ID NO: 3302 - protein, 366 aa, Homo sapiens
MRTLFNLLWLALACSPVHTTLSKSDAKKAASKTLLEKSQFSDKPVQDRGLVVTDLKAESVVLEHRSYCSAKARDRHFAGDVLGYVTPWNSHGYDVTKVFGSKFTQISPVWLQLKRRGREMFEVTGLHDVDQGWMRAVRKHAKGLHIVPRLLFEDWTYDDFRNVLDSEDEIEELSKTVVQVAKNQHFDGFVVEVWNQLLSQKRVGLIHMLTHLAEALHQARLLALLVIPPAITPGTDQLGMFTHKEFEQLAPVLDGFSLMTYDYSTAHQPGPNAPLSWVRACVQVLDPKSKWRSKILLGLNFYGMDYATSKDAREPVVGARSRSGRHVVFYPTLKSLQVRLELARELGVGVSIWELGQGLDYFYDLL

SEQ ID NO: 3303 - protein, 63 aa, Homo sapiens
MMPLASGRAPWDLTILLWLPHSTIWLCSMAKGASTRRQSLCASGHWRFEKRSWARIIQMWQNS

SEQ ID NO: 3304 - protein, 97 aa, Homo sapiens
  SITE (44): Xaa equals any amino acid
  SITE (45): Xaa equals any amino acid
  SITE (76): Xaa equals any amino acid
  SITE (96): Xaa equals any amino acid
MFCIPTPRFSLRETLLVLLFLFSFSIVDRVHRPHFGTLSSLQEXXIYWAQITHVRECICWLLAWLAFWAVTATWPXLWNMGSMHGDMGGIYGSLGXC

SEQ ID NO: 3305 - protein, 39 aa, Homo sapiens
MGPFPLLHGHLCCIDITNKVCLHCKKKKKKKKKKKKKKK

SEQ ID NO: 3306 - protein, 84 aa, Homo sapiens
MQRPFLSVPCLLLLPARVVWGCWCFLPGEDGGGCPTPSSGRIKLLQQCLLHPSLRSITVSRRSAQLLCRLKLQNHIPKVPGKNV

SEQ ID NO: 3307 - protein, 329 aa, Homo sapiens
SQYTATSTSQVQAILLPQPPEQLGLQVDDELEIKAYYAGHVLGAAMFQIKVGSESVVYTGDYNMTPDRHLGAAWIDKCRPNLLITESTYATTIRDSKRCRERDFLKKVHETVERGGKVLIPVFALGRAQELCILLETFWERMNLKVPIYFSTGLTEKANHYYKLFIPWTNQKIRKTFVQRNMFEFKHIKAFDRAFADNPGPMVVFATPGMLHAGQSLQIFRKWAGNEKNMVIMPGYCVQGTVGHKILSGQRKLEMEGRQVLEVKMQVEYMSFSAHADAKGIMQLVSSEQALKELGLAEHQCASPAACTCMTHARSRRRHCASTATSRAS

SEQ ID NO: 3308 - protein, 58 aa, Homo sapiens
  SITE (1): Xaa equals any amino acid
  SITE (6): Xaa equals any amino acid
  SITE (20): Xaa equals any amino acid
  SITE (22): Xaa equals any amino acid
XPDLPXTKGTKAGAPTAVAXAXELVDPPGCRIRHEQKWPVNGASFPCTLEMTSSPKCI

SEQ ID NO: 3309 - protein, 71 aa, Homo sapiens [sequence omitted]

SEQ ID NO: 3310 - protein, 43 aa, Homo sapiens
MWKNLGSGSVFVTWFSLVMILSGIGPLGDAEDSISDVSHRLRP

SEQ ID NO: 3311 - protein, 84 aa, Homo sapiens
MWSGLGAGISPGCCLCLVCSPSCLCGQSLPCRSSDFLPTVCPGPVVCVPLPSQTGNCLLLSLLGIASWSVANAPQAFLGLALLS

SEQ ID NO: 3312 - protein, 90 aa, Homo sapiens
MLVECTVHIGGARLITIRLLASPVQSFLWKAVDFSLASLSSSVSTYRISRSQPYRVCQTWLRRKSEARRTSTSEVWSAQWPPPSSPAIMA

SEQ ID NO: 3313 - protein, 93 aa, Homo sapiens
SQHFGWPRQADHLRLGVRDQPDQHGETPSPLKHTKLAGHGGVCLQSQLLRRLRQENRLNLGGGGCGEPRSCHCTLAWSTRVKLHLKKKKKGRP

SEQ ID NO: 3314 - protein, 339 aa, Homo sapiens
MLRLGIFGFLAFGFVLITFSCHFYDFFNQAEWERSFRDYVLCQANVTIGLPTKQPIPDCEIKNRPSLLVEKINLFAMFGTGIAMSTWVWTKATLLIWRRTWCRLTGQSDDEPKRIKKSKMIAKAFSKRHELLQNPGQELSFSMHTVSHDGPVAGLAFDLNEPSADVSSAWAQHVTKMVARRGAILPQDISVTPVATPVPPEEQANLWLVEAEISPELQKRLGRKKKRRKRKKEVCPLAPPPELHPPAPAPSTIPRLPQLPRQKCLVAAGAWGAGDSCRQGAWTLVSNPFCPEPSPPQDPFLPSAPAPVAWAHGRRQGLGPIHSRTNLMDTELMDADSDF

SEQ ID NO: 3315 - protein, 41 aa, Homo sapiens
MEYTFSKCFLSVIAVACVFIFFFNSGFAYPKATKIFSFIFF

SEQ ID NO: 3316 - protein, 246 aa, Homo sapiens
MVLASALLCVIVSVLTNVLVGGNTPRKNPMHPSSRWSELDLLILLGTAGHVLSLGASSFVEEEHQTWYFLVNTLCLALSQETYRNYFLGDDGEPPCGLCVEQGHDGATAAWQDGPGCDVLERDKGHGSPSTSEVLRGREKWMVLASPWLILACCRLLRSLNQTGVQWAHRPDLGHWLTSSDHKAELSVLAALSLLVVFVLVQRGVLPCVQGCPGAGAAGRLLLPGGHRECPVPVAAGQQGHFQGYY

SEQ ID NO: 3317 - protein, 41 aa, Homo sapiens
EPTINTQFCMFSKLYLLLLLILYYVPIVSQSHSRQEIFCTF

SEQ ID NO: 3318 - protein, 142 aa, Homo sapiens
  SITE (139): Xaa equals any amino acid
MSDSLVVCEVDPELTEKLRKFRFRKETDNAAIIMKVDKDRQMVVLEEEFQNISPEELKMELPERQPRFVVYSYKYVHDDGRVSYPLCFIFSSPVGCKPEQQMMYAGSKNRLVQTAELTKVFEIRTTDDLTEAWLQEKLXFFR

SEQ ID NO: 3319 - protein, 8 aa, Homo sapiens
MSIRWGDC

SEQ ID NO: 3320 - protein, 125 aa, Homo sapiens
MIVLFLLLVLVVIVVCSIRKSSRTLKKGPRQDPSAIVEKAGLKKSMTPTQNREKWIYYCNGHGIDILKLVAAQVGSQWKDIYQFLCNASEREVAAFSNGYTADHERAYAALQHWTIGAPRPASPS

SEQ ID NO: 3321 - protein, 302 aa, Homo sapiens
  SITE (26): Xaa equals any amino acid
  SITE (255): Xaa equals any amino acid
  SITE (256): Xaa equals any amino acid
PGLHPGNRGLRILLTLPPNWPQYIHXLRKKNKVPTAKKRNRIKRYVAAGRASMNSMTSAVPVANSVLVVAPHNGYPVTPGIMSHVPLYPNSQPQVHLVPGNPPSLVSNVNGQPVQKALKEGKTLGAIQIIIGLAHIGLGSIMATVLVGEYLSISFYGGFPFWGGLWFIISGSLSVAAENQPYSYCLLSGSLGLNIVSAICSAVGVILFITDLSIPHPYAYPDYYPYAWGVNPGMAISGVLLVFCLLEFGIACASXXFGCQLVCCQSSNVSVIYPNIYAANPVITPEPVTSPPSYSSEIQANK

SEQ ID NO: 3322 - protein, 63 aa, Homo sapiens
MRADDFIRGFPFCLVLILSCLPPCKTCLSVMLVRPPQPRGAVSSLNLFFFINYPVLVMSLSAL

SEQ ID NO: 3323 - protein, 57 aa, Homo sapiens
MMGVLQLLHIFWAYLILRMAHKFITGKLVEDERSTGKKQRAQRGRRLQLGEEQRAGP

SEQ ID NO: 3324 - protein, 212 aa, Homo sapiens
MERRRWCSGTWFARCTLFRGRRPSPPGGSSLGASGCGPGRPPGAGPASGASGRVVGAQQELGALFVDAGVDAVCVLLRLGDAGAAHGDGDVGLGVDGTAAGAGGGAAQDDGGHVDRGAAEAHVLLAEQPGQAAPAQAVGFRQVPGVPRRVVGDSVGPGRHAAQVGGRPEAAVGGPAPCRAARVARLLTRPQLQRVVEGTEHAGRQAPVQLLQ

SEQ ID NO: 3325 - protein, 40 aa, Homo sapiens
MQRLRFRFPELLGPQSLCLIIYLFIYLFAKNSPLQLIECT

SEQ ID NO: 3326 - protein, 59 aa, Homo sapiens
MGMVTLIIMNLWLLFIPTRMRIDQQPMQIKSKMRLQDKWLSANVQKGFRWSRSERINTG

SEQ ID NO: 3327 - protein, 1 aa, Homo sapiens
M

SEQ ID NO: 3328 - protein, 48 aa, Homo sapiens
MPRFLTPLPPSWLLPRLLLSGTCSGHPFQLCAYSSTTCRGFLPILFPS

SEQ ID NO: 3329 - protein, 702 aa, Homo sapiens
  SITE (4): Xaa equals any amino acid
MNPXRITLTKGNKSWSSTAVAAALELVDPPGCRNSARAKTDKTSTTGSILNLNLDRSKAEMDLKELSESVQQQSTPVPLISPKRQIRSRFQLNLDKTIESCKAQLGINEISEDVYTAVEHSDSEDSEKSDSSDSEYISDDEQKSKNEPEDTEDKEGCQMDKEPSAVKKKPKPTNPVEIKEELKSTSPASEKADPGAVKDKASPEPEKDFSEKAKPSPHPIKDKLKGKDETDSPTVHLGLDSDSESELVIDLGEDHSGREGRKNKKEPKEPSPKQDVVGKTPPSTTVGSHSPPETPVLTRSSAQTSAAGATATTSTSSTVTVTAPAPAATGSPVKKQRPLLPKETAPAVQRVVWNSSTVQQKEITQSPSTSTITLVTSTQSSPLVTSSGSMSTLVSSVNADLPIATASADVAADIAKYTSKMMDAIKGTMTEIYNDLSKNTTGSTIAEIRRLRIEIEKLQWLHQQELSEMKHNLELTMAEMRQSLEQERDRLIAEVKKQLELEKQQAVDETKKKQWCANCKKEAIFYCCWNTSYCDYPCQQAHWPEHMKSCTQSATAPQQEADAEVNTETLNKSSQGSSSSTQSAPSETASASKEKETSAEKSKESGSTLDLSGSRETPSSILLGSNQGSVSKRCDKQPAYAPTTTDHQPHPNYPAQKYHSRSNKSSWSSSDEKRGSTRSDHNTSTSTKSLLPKESRLDTFWD

SEQ ID NO: 3330 - protein, 83 aa, Homo sapiens [sequence omitted]

SEQ ID NO: 3331 - protein, 63 aa, Homo sapiens
FLSYLPLWLGPIWPCSGSTLGKPDPGVWPSLFRPWDAASPGNYALSRGENQYEKWGQGTHSSL

SEQ ID NO: 3332 - protein, 72 aa, Homo sapiens
SLPYIDLFLADLKHVADAPFKQWTDGNAARVLDNLKKLAAAGKKIIIRVPLIQGFNADETSVKAITDFAADE

SEQ ID NO: 3333 - protein, 28 aa, Homo sapiens
MCMVNLALWPRLGLARQLLLALLIPGRI

SEQ ID NO: 3334 - protein, 40 aa, Homo sapiens
MNGCVCVRDTSDFSFLILCENLFSTDFPGFKHCLLYKKLY

SEQ ID NO: 3335 - protein, 148 aa, Homo sapiens
MRTVLNILNFVLGGFATTLGWLLATLVSIVLIFTLPLTRSCWEITKLSLVPYGNEAIHVDELNPAGKNVLLNTGGTVLNIFWLIFFGWWLCLMHIATGIAQCISIIGIPVGIANFKIAAIALWPVGRRVVSVETAQAAREANARRRFE

SEQ ID NO: 3336 - protein, 98 aa, Homo sapiens
MALLLALSLLVLWTSPAPTLSGTNDAEDCCLSVTQKPIPGYIVRNFHYLLIKDGCRVPAVVFTTLRGRQLCAPPDQPWVERIIQRLQRTSAKMKRRSS

SEQ ID NO: 3337 - protein, 48 aa, Homo sapiens
MRLLLLLLVAASAMVRSEASANLGGVPSKRLKMQYATGPLLKFQICVS

SEQ ID NO: 3338 - protein, 14 aa, Homo sapiens
MPPLHKSKSVSPRQ

SEQ ID NO: 3339 - protein, 35 aa, Homo sapiens
MNLHQRRLLLIGHLMTLVKASKSFSFTEITSSRKK

SEQ ID NO: 3340 - protein, 109 aa, Homo sapiens
MGPSTPLLILFLLSWSGPLQGQQHHLVEYMERRLAALEERLAQCQDQSSRHAAELRDFKNKMLPLLEVAEKEREALRTEADTISGRVDRLEREVDYLETQNPVLPCVEF

SEQ ID NO: 3341 - protein, 20 aa, Homo sapiens
MLLSVAIFILLTLVYAYWTM

SEQ ID NO: 3342 - protein, 45 aa, Homo sapiens
MIYSVVGDFGLLLLLLYSRYLGKYHVFNISLLNAYHYRKERSGSC

SEQ ID NO: 3343 - protein, 72 aa, Homo sapiens
MSAIFNFQSLLTVILLLICTCAYIRSLAPSLLDRNKTGLLGIFWKCARIGERKSPYVAVCCIVMAFSILFIQ

SEQ ID NO: 3344 - protein, 138 aa, Homo sapiens
MKMMVVLLMLSSLSRLLGLMRPSSLRQYLDSVPLPPCQEQQPKASAELDHKACYLCHSLLMLAGVVVSCQDITPDQWGELQLLCMQLDRHISTQIRESPQAMHRTMLKDLATQTYIRWQELLTHCQPQAQYFSPWKDI

SEQ ID NO: 3345 - protein, 53 aa, Homo sapiens
MLKALFRTLQAMLLGVWILLLLASLAPLWLYCWRMFPTKGKRDQKEMLEVSGI

SEQ ID NO: 3346 - protein, 186 aa, Homo sapiens
MVWKVAVFLSVALGIGAVPIDDPEDGGKHWVVIVAGSNGWYNYRHQADACHAYQIIHRNGIPDEQIVVMMYDDIAYSEDNPTPGIVINRPNGTDVYQGVPKDYTGEDVTPQNFLAVLRGDAEAVKGIGSGKVLKSGPQDHVFIYFTDHGSTGILVFPNEDLHVKDLNETIHYMYQTQNVPKDGVLH

SEQ ID NO: 3347 - protein, 28 aa, Homo sapiens
MLEASELCLCVFILDTICLEGLPQTRVS

SEQ ID NO: 3348 - protein, 251 aa, Homo sapiens [sequence omitted]

SEQ ID NO: 3349 - protein, 45 aa, Homo sapiens
MLFLFWVVFSVLICIISFNFPINPMMRHCDYLHFIVRWLRHRDAK

SEQ ID NO: 3350 - protein, 30 aa, Homo sapiens
  SITE (2): Xaa equals any amino acid
  SITE (23): Xaa equals any amino acid
  SITE (25): Xaa equals any amino acid
MXMIGIENWLANTLFLFLFCFFXWXQGFSV

SEQ ID NO: 3351 - protein, 74 aa, Homo sapiens
MKGLVGFILAVFIFIQFLNCIYSILMKFHLFGITEEMKPILLQYCAFLKCFYPLLSRMSILCFEYINNMFLCSN

SEQ ID NO: 3352 - protein, 126 aa, Homo sapiens
MVRITQTSSTILIAMLLNSLVGIVLFVSILWFKQGMAGFGELVSSVRWWTLIPGLLGSFFVFASISGYQNVGAATTIAVLVASQLIGGLMLDIFRSHGVPLRALFGPICGAILLVVGAWLVARRSF

SEQ ID NO: 3353 - protein, 135 aa, Homo sapiens
MSSWQAASSRSLAFIFLLESIWALSSCLLRFTRDLTSDFILLMYRRAMVNSSSMTPFTSAKVFTSLVPIIPPISPRSFNSKFRISVALFFWWLLSSCSWLSSLCVVVNVVVFWASSSVSCSLARVLSSTSCDFWS

SEQ ID NO: 3354 - protein, 48 aa, Homo sapiens
MSHHARMDFLLFVCLWIMYFHITTCFNFPGQHSEISILKKVEIEMHNS

SEQ ID NO: 3355 - protein, 91 aa, Homo sapiens
  SITE (13): Xaa equals any amino acid
MEKTLFLYHYLPXLTFQILLLPVVLQHISDHLCRSQLQRSIFSALVVAWYSSACHVSNTLRPLTYGDKSLSPHELKALRWKDSWDILIRKH

SEQ ID NO: 3356 - protein, 191 aa, Homo sapiens
RERIWVVDGGNIKLKTAIQNTGKMSTGLALDSEGKRLYTTNADGELITIDTADNKILSRKKLLDDGKEHFFINISLDTARQRAFITDSKAAEVLVVDTRNGNILAKVAAPESLAVLFNPARNEAYVTHRQAGKVSVIDAKSYKVVKTFDTPTHPNSLALSADGKTLYVSVKQKSTKQQEATQPDDVIRIAL

SEQ ID NO: 3357 - protein, 285 aa, Homo sapiens
  SITE (76): Xaa equals any amino acid
  SITE (102): Xaa equals any amino acid
  SITE (285): Xaa equals any amino acid
MLTAIPLLTLPQFIMLQYVKGKAESWPGLSLYDKYNTLAWELISHLWFLLVLVVMTTLCVWIFKRIRNNLENSDKXNKKFSMVKLSVIFLCLGIGYAVIRRXIFIVYPPILSNGMFNFIVMQTLFYLPFFILGALAFIFPHLKALFTTPSRGCTLAAALAFVAYLLNQRYGSGDAWMYETESVITMVLGLWMVNVVFSFGHRLLNFQSARVTYFVNASLFIYLVHHPLTLFFGAYITPHITSNWLGFLCGLIFVVGIAIILYEIHLRIPLLKFLFSGKPVPNSPX

SEQ ID NO: 3358 - protein, 276 aa, Homo sapiens
  SITE (111): Xaa equals any amino acid
MRRFFWLVAAALLLAGCAGEKGIVEKEGYQLDTRRQAQAAYPRIKVLVIHYTADDFDSSLATLTDKQVSSHYLVPAVPPRYNGKPRIWQLVPEQELAWHAGISAWRGATRXNDTSIGIELENRGWQKSAGVKYFAPFEPAQIQALIPLAKDIIARYHIKPENVVAHADIAPQRKDDPGPLFPWQQLAQQGIGAWPDAQRVNFYLAGRAPHTPVDTASLLELLARYGYDVKPDMTPREQRRVIMAFQMHFRPTLYNGEADAETQAIAEALLEKYGQD

SEQ ID NO: 3359 - protein, 53 aa, Homo sapiens
MRVLLFLLLSLFMLPAFSADNLLRWHDAHISRCKPLRRLKPNAHGNCARFIPA

SEQ ID NO: 3360 - protein, 49 aa, Homo sapiens
MVLVFAYLCVLLIVCWVTSKTSLALKYTVYKNFKRLIWNKSILIITLTP

SEQ ID NO: 3361 - protein, 21 aa, Homo sapiens
MHILCETNVYPLLLNFVLWIL

SEQ ID NO: 3362 - protein, 122 aa, Homo sapiens
  SITE (36): Xaa equals any amino acid
  SITE (96): Xaa equals any amino acid
MSLLRNRLQALPALCLCVLVLACIGACQPEAQEGTXSPPPKLKMSRWSLVRGRMKELLETVVNRTRDGWQWFWSPSTFRGFMQTYYDDHLRDLGPXTKAWFLESKDSLLKKTHSCAPGCLWG

SEQ ID NO: 3363 - protein, 467 aa, Homo sapiens; identical to SEQ ID NO: 3242

SEQ ID NO: 3364 - protein, 32 aa, Homo sapiens
MSNAELALLLFIILTVGHYAVVWSIYLGKTTG

SEQ ID NO: 3365 - protein, 271 aa, Homo sapiens
MEALPLLAATTPDHGRHRRLLLLPLLLFLLPAGAVQGWETEERPRTREEECHFYAGGQVYPGEASRVSVADHSLHLSKAKISKPAPYWEGTAVIDGEFKELKLTDYRGKYLVFFFYPLDFTFVCPTEIIAFGDRLEEFRSINTEVVACSVDSQFTHLAWINTPRRQGGLGPIRIPLLSDLTHQISKDYGVYLEDSGHTLRGLFIIDDKGILRQITLNDLPVGRSVDETLRLVQAFQYTDKHGEVCPAGWKPGSETIIPDPAGKLKYFDKLN

SEQ ID NO: 3366 - protein, 286 aa, Homo sapiens
MSIQHFRVALIPFFAAFCLPVFAHPETLVKVKDAEDQLGARVGYIELDLNSGKILESFRPEERFPMMSTFKVLLCGAVLSRIDAGQEQLGRRIHYSQNDLVEYSPVTEKHLTDGMTVRELCSAAITMSDNTAANLLLTTIGGPKELTAFLHNMGDHVTRLDRWEPELNEAIPNDERDTTMPVAMATTLRKLLTGELLTLASRQQLIDWMEADKVAGPLLRSALPAGWFIADKSGAGERGSRGIIAALGPDGKPSRIVVIYTTGSQATMDERNRQIAEIGASLIKHW

SEQ ID NO: 3367 - protein, 354 aa, Homo sapiens
MNISLVWCLLVLSFAIKVLFSLTTHYFKVEDGGERSVCVTFGFFFFVKAMAVLIVTENYLEFGLETGFTNFSDSAMQFLEKQGLESQSPVSKLTFKFFLAIFCSFIGAFLTFPGLRLAQMHLDALNLATEKITQTLLHINFLAPLFMVLLWVKPITKDYIMNPPLGKESIPLMTEATFDTLRLWLIILLCALRLAMMRSHLQAYLNLAQKCVDQMKKEAGRISTVELQKMVARVFYYLCVIALQYVAPLVMLLHTTLLLKTLGNHSWGIYPESISTLPVDNSLLSNSVYSELPSAEGKMKVTVTQITVALSSLKNIFTPLLFRGLLSFLTWWIAACLFSTSLFGLFYHQYLTVA

SEQ ID NO: 3368 - protein, 233 aa, Homo sapiens
MSTESMIRDVELAEEALPKKTGGPQGSRRCLFLSLFSFLIVAGATTLFCLLHFGVIGPQREEFPRDLSLISPLAQAVRSSSRTPSDKPVAHVVANPQAEGQLQWLNRRANALLANGVELRDNQLVVPSEGLYLIYSQVLFKGQGCPSTHVLLTHTISRIAVSYQTKVNLLSAIKSPCQRETPEGAEAKPWYEPIYLGGVFQLEKGDRLSAEINRPDYLDFAESGQVYFGIIAL

SEQ ID NO: 3369 - protein, 286 aa, Homo sapiens; identical to SEQ ID NO: 3366

SEQ ID NO: 3370 - protein, 80 aa, Homo sapiens
MVLLRKLCLPMLCFLLHTILHSTGQYQECLQLADMVSSERHKLYLVFSKEELRKLLQKLRESSLMLLDQGLDPLGYEIQL

SEQ ID NO: 3371 - protein, 194 aa, Homo sapiens
MRLSLPLLLLLLGAWAIPGGLGDRAPLTATAPQLDDEEMYSAHMPAHLRCDACRAVAYQSLLVPDVAKSGKGRDQTSYLKLWGAAGAERVGLHGCPGPELLPELAGLRIREVDQVKLLTGPGLSEGPEPSISVMVTGGPWPTRLSRTCLHYLGEFGEDQIYEAHQQGRGALEALLCGGPQGACLEKVSATREEL

SEQ ID NO: 3372 - protein, 205 aa, Homo sapiens
  SITE (13): Xaa equals any amino acid
  SITE (122): Xaa equals any amino acid
MTPPERLFLPRVXGTTLHLLLLGLLLVLLPGAQGLPGVGLTPSAAQTARQHPKMHLAHSTLKPAAHLIGDPSKQNSLLWRANTDRAFLQDGFSLSNNSLLVPTSGIYFVYSQVVFSGKAYSXKATSSPLYLAHEVQLFSSQYPFHVPLLSSQKMVYPGLQEPWLHSMYHGAAFQLTQGDQLSTHTDGIPHLVLSPSTVFFGAFAL

SEQ ID NO: 3373 - protein, 114 aa, Homo sapiens
  SITE (82): Xaa equals any amino acid
MSIQHFRVALIPFFAAFCLPVFAHPETLVKVKDAEDQLGARVGYIELDLNSGKILESFRPEERFPMMSTFKVLLCGAVLSRXDAGQEQLGRRIHYSQNDLVEYSPVTEKHLTEA

SEQ ID NO: 3374 - protein, 166 aa, Homo sapiens
MKYTSYILAFQLCIVLGSLGCYCQDPYVKEAENLKKYFNAGHSDVADNGTLFLGILKNWKEESDRKIMQSQIVSFYFKLFKNFKDDQSIQKSVETIKEDMNVKFFNSNKKKRDDFEKLTNYSVTDLNVQRKAIHELIQVMAELSPAAKTGKRKRSQMLFRGRRASQ

SEQ ID NO: 3375 - protein, 83 aa, Homo sapiens
  SITE (4): Xaa equals any amino acid
  SITE (49): Xaa equals any amino acid
  SITE (58): Xaa equals any amino acid
MSPXGSTHDSQTAANKGQDVAPQKVFRFPLFLDEYDSYDGTSYSQKMRXRGTMSEQRXEGVGGEHTQLAQKHSGTGPATMSWS

SEQ ID NO: 3376 - protein, 87 aa, Homo sapiens
RIFLRSFFSARNLLLANKKTTATSGGLFAGSRATNSFSEGNWLQQSADTKYCSSSVAVVRPPLQELCSTAYIPRSANPVTSGCCQWR

SEQ ID NO: 3377 - protein, 31 aa, Homo sapiens
MSIQHFRVALIPFFAAFCLPVFAHPVNAGVK

SEQ ID NO: 3378 - protein, 70 aa, Homo sapiens
MWFEILPGLSVMGVCLLIPGLATAYIHRFTNGGKEKRVAHFGYHWSLMERDRRISGVDRYYVSKGLENID

SEQ ID NO: 3379 - protein, 334 aa, Homo sapiens
MAPRSLLLLLSGALALTDTWAGSHSLRYFSTAVSRPGRGEPRYIAVEYVDDTQFLRFDSDAAIPRMEPREPWVEQEGPQYWEWTTGYAKANAQTDRVALRNLLRRYNQSEAGSHTLQGMNGCDMGPDGRLLRGYHQHAYDGKDYISLNEDLRSWTAADTVAQITQRFYEAEEYAEEFRTYLEGECLELLRRYLENGKETLQRADPPKAHVAHHPISDHEATLLLGPGLLPCGDHADLAAGWGGTDPGHRACGDQACRGWNLPEVGRCGGAFWRGTEIHMPCAARGAAPAPHPEMGAVSPAHHPHRGHRCWPCCPWSCGHWSCGRCCDVEEEELR

SEQ ID NO: 3380 - protein, 156 aa, Homo sapiens
MSIQHFRVALIPFFAAFCLPVFAHPETLVKVKDAEDQLGARVGYIELDLNSGKILESFRPEERFPMMSTFKVLLCGAVLSRIDAGQEQLGRRIHYSQNDLVEYSPVTEKHLTDGMTVRELCSAAITMSDNTAANLLLTTIGGPKELTAFLPTWGIM

SEQ ID NO: 3381 - protein, 32 aa, Homo sapiens
MFRVLAKNLKYMYMLYLMLDVCLTWLEKLALR

SEQ ID NO: 3382 - protein, 116 aa, Homo sapiens
MKGWGWLALLLGALLGTAWARRSQDLHCGACRALVDELEWEIAQVDPKKTIQMGSFRINPDGSQSVVEVPYARSEAHLTELLEEICDRMKEYGEQIDPSTHRKNYVRVVGRNGESS

SEQ ID NO: 3383 - protein, 63 aa, Homo sapiens
MKHVLNLYLLGVVLTLLSIFVRVMESLEGLLESPSPGTSWTTRSQLANTEPTKGLPDHPSRSM

SEQ ID NO: 3384 - protein, 41 aa, Homo sapiens
MCLSLGATGIRGFRIICWGLVGWGAFLCFVGGSATPLASTK

SEQ ID NO: 3385 - protein, 46 aa, Homo sapiens [sequence omitted]

SEQ ID NO: 3386 - protein, 43 aa, Homo sapiens
MEFITGISIMLVLVLSRPSVQTQNVSIFYFNLQLVVMSSMHII

SEQ ID NO: 3387 - protein, 156 aa, Homo sapiens
MPALLPVASRLLLLPRVLLTMASGSPPTQPSPASDSGSGYVPGSVSAAFVTCPNEKVAKEIARAVVEKRLAACVNLIPQITSIYEWKGKIEEDSEVLMMIKTQSSLVPALTDFVRSVHPYEVAEVIALPVEQGNFPYLQWVRQVTESVSDSITVLP

SEQ ID NO: 3388 - protein, 43 aa, Homo sapiens
MYNSIQHICLVPRYIALILGLLCIPLQYGGVRHSTVACAELIS

SEQ ID NO: 3389 - protein, 33 aa, Homo sapiens
MKEKMEQRERACQVSVRLSLLLLLLLSAVELRE

SEQ ID NO: 3390 - protein, 186 aa, Homo sapiens
  SITE (60): Xaa equals any amino acid
  SITE (72): Xaa equals any amino acid
  SITE (76): Xaa equals any amino acid
MVIILTRCWSPTKGERHEERLTKVVLPCFPQEVAPTAGTQESDPQSPALDARSGASKRFXAVPAALGPGLPXRGAXGGVGRRPGSFLFCPAPLLLTRARGRPGHWAPRSQREVCAESERRSSRPKADASTPSWPPQRRRGAAPCPVASRSSPPCPTCSSSLSLSSGAWCGSWWPPPWCPGPWSRAG

SEQ ID NO: 3391 - protein, 72 aa, Homo sapiens
MWLDYIWIFHLFVQSLCHNIQRRWIMDLPQSDCGLFPLGFIYLDASNFPFLMVNIFIIKSTLSDCLSGPDLP

SEQ ID NO: 3392 - protein, 95 aa, Homo sapiens
LTPWETAGRERESMISYLCVCVVFFFFWKTESHTFAQAGVQWRDLGSLQPLPPGFKRFSCLSFPSSWDYRHTPQRLANFNILSRDRVSPCWPGCS

SEQ ID NO: 3393 - protein, 256 aa, Homo sapiens
MKAPCSGSGSVSMGALGLEGRGGRLQGRGSLLLAVAGATSLVTLLLAVPITVLAVLALVPQDQGGLVTETADPGAQAQQGLGFQKLPEEEPETDLSPGLPAAHLIGAPLKGQGLGWETTKEQAFLTSGTQFSDAEGLALPQDGLYYLYCLVGYRGRAPPGGGDPQGRSVTLRSSLYRAGGAYGPGTPELLLEGAETVTPVLDPARRQGYGPLWYTSVGFGGLVQLRRGERVYVNISHPDMVDFARGKTFFGAVMVG

SEQ ID NO: 3394 - protein, 263 aa, Homo sapiens
MVKIAFNTPTAVQKEEARQDVEALLSRTVRTQILTGKELRVATQEKEGSSGRCMLTLLGLSFILAGLIVGGACIYKYFMPKSTIYRGEMCFFDSEDPANSLRGGEPNFLPVTEEADIREDDNIAIIDVPVPSFSDSDPAAIIHDFEKGMTAYLDLLLGNCYLMPLNTSIVMPPKNLVELFGKLASGRYLPQTYVVREDLVAVEEIRDVSNLGIFIYQLCNNRKSFRLRRRDLLLGFNKRAIDKCWKIRHFPNEFIVETKICQE

SEQ ID NO: 3395 - protein, 194 aa, Homo sapiens
MSQNGAPGMQEESLQGSWVELHFSNNGNGGSVPASVSIYNGDMEKILLDAQHESGRSSSKSSHCDSPPRSQTPQDTNRASETDTHSIGEKNSSQSEEDDIERRKEVESILKKNSDWIWDWSSRPENIPPKEFLFKHPKRTATLSMRNTSVMKKGGIFSAEFLKVFLPSLLLSHLLAIGLGIYIGRRLTTSTSTF

SEQ ID NO: 3396 - protein, 46 aa, Homo sapiens
  SITE (43): Xaa equals any amino acid
  SITE (45): Xaa equals any amino acid
MMCLASPFLLHYLSFFLGDGPGRQSETLSQKKKKKKKEKPKNXNXN

SEQ ID NO: 3397 - protein, 357 aa, Homo sapiens
MQDSEMILTATFHFYSEPPRWPRALEVLCKPRAKNASGRPLPLGPPTRQHLLFRSLSQNTATQGLLRGAMALAPPPRGLWQAKDISPIVKAARRDGELLLSAQLDSEERDPGVPRPSPYAPYILVYANDLAISEPNSVAVTLQRYDPFPAGDPEPRAAPNNSADPRVRRAAQATGPLQDNELPGLDERPPRAHAQHFHKHQLWPSPFRALKPRPGRKDRRKKGQEVFMAASQVLDFDEKTMQKARRKQWDEPRVCSRRYLKVDFADIGWNEWIISPKSFDAYYCAGACEFPMPKIVRPSNHATIQSIVRAVGIIPGIPEPCCVPDKMNSLGVLFLDENRNVVLKVYPNMSVDTCACR

SEQ ID NO: 3398 - protein, 448 aa, Homo sapiens
  SITE (248): Xaa equals any amino acid
  SITE (249): Xaa equals any amino acid
  SITE (250): Xaa equals any amino acid
MPGIKRILTVTILALCLPSPGNAQAQCTNGFDLDRQSGQCLDIDECRTIPEACRGDMMCVNQNGGYLCIPRTNPVYRGPYSNPYSTPYSGPYPAAAPPLSAPNYPTISRPLICRFGYQMDESNQCVDVDECATDSHQCNPTQICINTEGGYTCSCTDGYWLLEGQCLDIDECRYGYCQQLCANVPGSYSCTCNPGFTLNEDGRSCQDVNECATENPCVQTCVNTYGSFICRCDPGYELEEDGVHCSDXXXCSFSEFLCQHECVNQPGTYFCSCPPGYILLDDNRSCQDINECEHRNHTCNLQQTCYNLQGGFKCIDPIRCEEPYLRISDNRCMCPAENPGCRDQPFTILYRDMDVVSGRSVPADIFQMQATTRYPGAYYIFQIKSGNEGREFYMRQTGPISATLVMTRPIKGPREIQLDLEMITVNTVINFRGSSVIRLRIYVSQYPF

SEQ ID NO: 3399 - protein, 270 aa, Homo sapiens
  SITE (50): Xaa equals any amino acid
MHGSCSFLMLLLPLLLLLVATTGPVGALTDEEKRLMVELHNLYRAQVSPXASDMLHMRWDEELAAFAKAYARQCVWGHNKERGRRGENLFAITDEGMDVPLAMEEWHHEREHYNLSAATCSPGQMCGHYTQVVWAKTERIGCGSHFCEKLQGVEETNIELLVCNYEPPGNVKGKRPYQEGTPCSQCPSGYHCKNSLCEPIGSPEDAQDLPYLVTEAPSFRATEASDSRKMGAEGPDKPSVVSGLNSGPGHVWGPLLGLLLLPPLVLAGIF

SEQ ID NO: 3400 - protein, 54 aa, Homo sapiens
MQQRGLAIVALAVCAALHASEAILPIASSCCTVGFTSYFQKAPGKSEYVSHPES

SEQ ID NO: 3401 - protein, 21 aa, Homo sapiens
MPTPCTSLPSCCQHRSITMTL

SEQ ID NO: 3402 - protein, 12 aa, Homo sapiens
MVNALSYSLCRT

SEQ ID NO: 3403 - protein, 98 aa, Homo sapiens
  SITE (67): Xaa equals any amino acid
  SITE (91): Xaa equals any amino acid
MASTPLFTVVILPLAVLYTLVQRFYAATSRQLKRLESVSRSPIYSHFSETVTGASVIRAYNRSRDFXIISDTKVDANQRKLLLQRRTFGGXWELSHLH

SEQ ID NO: 3404 - protein, 101 aa, Homo sapiens
EMLSQDPRHQGFLVGMRQGPALHGAPHYPTAFPVLAGHSHHSGAVISHFKQAKRIYLSGKIPRSQRWFSQGKVRPLHSRCADPCDFFICGELHSHSPQQYK

SEQ ID NO: 3405 - protein, 56 aa, Homo sapiens
MQRLGATLLCLLLAAAVPTAPAPAPTATSAPVKPGPALSYPQRRPPSMRCSARLRN

SEQ ID NO: 3406 - protein, 97 aa, Homo sapiens
MWLRSLLKPIHVFFGAAILSLSIASVISGINEKLFFSLKNTTRPYHSLPSEAVFANSTGMLVVAFGLLVLYILLASSWKRPEPGILTDRQPLLHDGE

SEQ ID NO: 3407 - protein, 431 aa, Homo sapiens
MSWVQATLLARGLCRAWGGTCGAALTGTSISQVPRRLPRGLHCSAAAHSSEQSLVPSPPEPRQRPTKALVPFEDLFGQAPGGERDKASFLQTVQKFAEHSVRKRGHIDFIYLALRKMREYGVERDLAVYNQLLNIFPKEVFRPRNIIQRIFVHYPRQQECGIAVLEQMENHGVMPNKETEFLLIQIFGRKSYPMLKLVRLKLWFPRFMNVNPFPVPRDLPQDPVELAMFGLRHMEPDLSARVTIYQVPLPKDSTGAADPPQPHIVGIQSPDQQAALARHNPARPVFVEGPFSLWLRNKCVYYHILRADLLPPEEREVEETPEEWNLYYPMQLDLEYVRSGWDNYEFDINEVEEGPVFAMCMAGAHDQATMAKWIQGLQETNPTLAQIPVVFRLAGSTRELQTSSAGLEEPPLPEDHQEEDDNLQRQQQGQS

SEQ ID NO: 3408 - protein, 112 aa, Homo sapiens [sequence omitted]

SEQ ID NO: 3409 - protein, 6 aa, Homo sapiens
FCFASC

SEQ ID NO: 3410 - protein, 54 aa, Homo sapiens
  SITE (24): Xaa equals any amino acid
  SITE (30): Xaa equals any amino acid
  SITE (40): Xaa equals any amino acid
  SITE (47): Xaa equals any amino acid
  SITE (48): Xaa equals any amino acid
MCHGGLLHPSTCHLHWVFLLMLSXPLPPTXQQAPVCDVPXPVSICSXXSTSTYE

SEQ ID NO: 3411 - protein, 54 aa, Homo sapiens
MCLSRKRGQVWHFIYIYILFFFVTELDSVSKRKKKFSPKPGVVAHTQNSSTLRG

SEQ ID NO: 3412 - protein, 104 aa, Homo sapiens
  SITE (73): Xaa equals any amino acid
  SITE (83): Xaa equals any amino acid
  SITE (92): Xaa equals any amino acid
  SITE (94): Xaa equals any amino acid
  SITE (95): Xaa equals any amino acid
  SITE (98): Xaa equals any amino acid
MSMLPGSSLCISFLFLSALSSFSFTENQACYKQQPSGTELTCYDLLQEPRSSQICELPWLKLVRGVLKGVQFXSQRPLGWVVXLLLHRLNLXSXXISXISDPRP

SEQ ID NO: 3413 - protein, 60 aa, Homo sapiens
EKHWALLRTRLASRVLSCPFQVFFFVCLFVFFLTEFHSLAQARVQWCDLSPLQPPPPGFK

SEQ ID NO: 3414 - protein, 13 aa, Homo sapiens
CVVSGPLASLPSV

SEQ ID NO: 3415 - protein, 79 aa, Homo sapiens
MTLMCLCLSVTVLHPLRSKERLSGTFCGYSSSWCSPASESSSPGSLLTCAASGSHPDCPLSQRLLGVQLAALGRPQGLF

SEQ ID NO: 3416 - protein, 43 aa, Homo sapiens
MLTRSLKTLPSACTAFLLLFFLFSSGDPELSCSCTLRTQSSWS

SEQ ID NO: 3417 - protein, 259 aa, Homo sapiens
MISFSAPPLMLPFSFYFFVFPVARTARKRKPSPEPEGEVGPPKINGEAQPWLSTSTEGLKIPMTPTSSFVSPPPPTASPHSNRTTPPEAAQNGQSPMAALILVADNAGGSHASKDANQVHSTTRRNSNSPPSPSSMNQRRLGPREVGGQGAGNTGGLEPVHPASLPDSSLATSAPLCCTLCHERLEDTHFVQCPSVPSHKFCFPCSRQSIKQQGASGEVYCPSGEKCPLVGSNVPWAFMQGEIATILAGDVKVKKERDS

SEQ ID NO: 3418 - protein, 73 aa, Homo sapiens
MRRRFWGVFNCLCAGAFGALAAASAKLAFGSKVVRTSGTSLFPYQGPKTFSPVGLVRSRGRTTPPTSTLYLSF

SEQ ID NO: 3419 - protein, 18 aa, Homo sapiens
MSIRSAWCGLSSIPGYPC

SEQ ID NO: 3420 - protein, 28 aa, Homo sapiens
DLFSLLLSLLADCNSGPTQPSLWTAIEK

SEQ ID NO: 3421 - protein, 25 aa, Homo sapiens
MWSLNTRGGGHFRVCVLWFPFLSIS

SEQ ID NO: 3422 - protein, 53 aa, Homo sapiens [sequence omitted]

SEQ ID NO: 3423 - protein, 87 aa, Homo sapiens
MLPVFAMLANVSGAPLMLTALALLFSNSYGGMVTHYGGAAGPVIFGVGYNDIKSWWLVGAVLTILTFLVHITLGVWWWNMLIGWNML

SEQ ID NO: 3424 - protein, 89 aa, Homo sapiens
MSLWVVTVSFLSWWCVPSGATLHFLSQAARTAQPCQCCDHGPVFGFHLLVLHKLLLSLWPRPLPRCGWFWPGRHKVAVGQDTSPVLALQ

SEQ ID NO: 3425 - protein, 38 aa, Homo sapiens; identical to SEQ ID NO: 2989

SEQ ID NO: 3426 - protein, 58 aa, Homo sapiens
  SITE (32): Xaa equals any amino acid
  SITE (47): Xaa equals any amino acid
LIEAAWSVACLASRQQSHHSEQHPCLCGQSTXQPQYRPVPLPLLAEXHPLHYRAETIM

SEQ ID NO: 3427 - protein, 64 aa, Homo sapiens [sequence omitted]

SEQ ID NO: 3428 - protein, 41 aa, Homo sapiens
MVWLSENASHLSWNLILLNVCFLVICCTSQHHCDHGDASFA

SEQ ID NO: 3429 - protein, 107 aa, Homo sapiens
MASLGHILVFCVGLLTMAKAESPKEHDPFTYDYQSLQIGGLVIAGILFILGILIVLSRRCRCKFNQQQRTGEPMKRRELSAAPSAVCPPAAVETPGAMESGQDSPGT

SEQ ID NO: 3430 - protein, 247 aa, Homo sapiens
MPAVGFLLLVLGLKALELWMQLHEAGMGLEEPGGAPGPSVPLPPSQGVGLASLVAPLLISQAMGLALYVLPVLGQHVATQHFPVAEAEAVVLTLLAIYAAGLALPHNTHRVVSTQAPDRGWMALKLVALIYLALQLGCIALTNFSLGFLLATTMVPTAALAKPHGPRTLYAALLVLTSPAATLLGSLFLWRELQEAPLSLAEGWQLFLAALAQGVLEHHTYGALLFPLLSLGLYPCWLLFWNVLFWK

SEQ ID NO: 3431 - protein, 44 aa, Homo sapiens
MLVPLCWDCFWLLLVDLCIFEEVIWNFSLIKLDGLLQLCVLCLL

SEQ ID NO: 3432 - protein, 38 aa, Homo sapiens
MVQNHVHAWYFMLLSLPSTGDATTSPCISRASIAHTPG

SEQ ID NO: 3433 - protein, 477 aa, Homo sapiens
MDQALVGMCVNERRFVKIPPKLAYGNEGVSGVIPPNSVLHFDVLLMDIWNSEDQVQIHTYFKPPSCPRTIQVSDFVRYHYNGTFLDGTLFDSSHNRMKTYDTYVGIGWLIPGMDKGLLGMCVGEKRIITIPPFLAYGEDGDGKDIPGQASLVFDVALLDLHNPKDSISIENKVVPENCERISQSGDFLRYHYNGTLLDGTLFDSSYSRNRTFDTYIGQGYVIPGMDEGLLGVCIGEKRRIVVPPHLGYGEEGRGNIPGSAVLVFDIHVIDFHNPSDSISITSHYKPPDCSVLSKKGDYLKYHYNASLLDGTLLDSTWNLGKTYNIVLGSGQVVLGMDMGLREMCVGEKRTVIIPPHLGYGEAGVDGEVPGSAVLVFDIELLELVAGLPEGYMFIWNGEVSPNLFEEIDKDGNGEVLLEEFSEYIHAQVASGKGKLAPGFDAELIVKNMFTNQDRNGDGKVTAEEFKLKDQEAKHDEL

SEQ ID NO: 3434 - protein, 90 aa, Homo sapiens
MKLYMVPWPLVLMIFNISATVLYITAFIACSAAVDLTSLRGTRPYNQRAAASFFACLVMIAYGVSAFFSYQAWRGVGSNAATSQMAGGYA

SEQ ID NO: 3435 - protein, 145 aa, Homo sapiens
MATWALLLLAAMLLGNPGLVFSRLSPEYYDLARAHLRDEEKSCPCLAQEGPQGDLLTKTQELGRDYRTCLTIVQKLKKMVDKPTQRSVSNAATRVCRTGRSRWRDVCRNFMRRYQSRVTQGLVAGETAQQICEDLRLCIPSTGPL

SEQ ID NO: 3436 - protein, 104 aa, Homo sapiens [sequence omitted]

SEQ ID NO: 3437 - protein, 107 aa, Homo sapiens
MPPPFLRKPLILCVFLPTEGNCGGSSLAFLLNFAGNSPQFLSEVRTVHYQRDWTLYPLAKWEKILPAHSTPPWPSPTPHPQQHFHGNPDGRVVLWLSCDRLAFILES

SEQ ID NO: 3438 - protein, 5 aa, Homo sapiens
KWSEL

SEQ ID NO: 3439 - protein, 85 aa, Homo sapiens
MTQLLTVSFFVLGCLVCPLSSCTVEVGICPTARRHCRSSLMSPWYLCPAQNWRRLAPGSAPSAWCSAHAPTAEGLALGYCWPGVG

SEQ ID NO: 3440 - protein, 90 aa, Homo sapiens
MAVTWRQALLRALCISGVCSQGKWKRFFQSSTAHPSMRWRGRPLARTLSVWTKDAKLCCGHSTDGALRAGRTPVPSSEEAHGLLQPCPGR

SEQ ID NO: 3441 - protein, 76 aa, Homo sapiens
MLWLWLMSIASSSLRTHRAQMRSKLPAGVCCRKHGCWQMRVSGSTSCTISFPIPRSQRALSSILSCPLCVSTTSRD

SEQ ID NO: 3442 - protein, 241 aa, Homo sapiens
MLDTLVFSSLLLFGFAEQKQLLEVELYADYRENSYVPTTGAIIEIHSKRIQLYGAYLRIHAHFTGLRYLLYNFPMTCAFIGVASNFTFLSVIVLFSYMQWVWGGIWPRHRFSLQVNIRKRDNSRKEVQRRISAHQPGPEGQEESTPQSDVTEDGESPEDPSGTEGQLSEEEKPDQQPLSGEEELEPEASDGSGSWEDAALLTEANLPAPAPASASAPVLETLGSSEPAGGALRQRPTCSSS

SEQ ID NO: 3443 - protein, 84 aa, Homo sapiens [sequence omitted]

SEQ ID NO: 3444 - protein, 246 aa, Homo sapiens
MSLQWTAVATFLYAEVFVVLLLCIPFISPKRWQKIFKSRLVELLVSYGNTFFVVLIVILVLLVIDAVREIRKYDDVTEKVNLQNNPGAMEHFHMKLFRAQRNLYIAGFSLLLSFLLRRLVTLISQQATLLASNEAFKKQAESASEAAKKYMEENDQLKKGAAVDGGKLDVGNAEVKLEEENRSLKADLQKLKDELASTKQKLEKAENQVLAMRKQSEGLTKEYDRLLEEHAKLQAAVDGPMDKKEE

SEQ ID NO: 3445 - protein, 201 aa, Homo sapiens
MDLSLLWVLLPLVTMAWGQYGDYGYPYQQYHDYSDDGWVNLNRQGFSYQCPQGQVIVAVRSIFSKKEGSDRQWNYACMPTPQSLGEPTECWWEEINRAGMEWYQTCSNNGLVAGFQSRYFESVLDREWQFYCCRYSKRCPYSCWLTTEYPGHYGEEMDMISYNYDYYIRGATTTFSAVERDRQWKFIMCRMTEYDCEFANV

SEQ ID NO: 3446 - protein, 77 aa, Homo sapiens
MRLVFFFGVSIILVLGSTFVAYLPDYRCTGCPRAWDGMKEWSRREAERLVKYREANGLPIMESNCFDPSKIQLPEDE

SEQ ID NO: 3447 - protein, 22 aa, Homo sapiens
  SITE (19): Xaa equals any amino acid
  SITE (21): Xaa equals any amino acid
MTSMGLPGSAYLWASASSXCXF

SEQ ID NO: 3448 - protein, 319 aa, Homo sapiens
MSSNKEQRSAVFVILFALITILILYSSNSANEVFHYGSLRGRSRRPVNLKKWSITDGYVPILGNKTLPSRCHQCVIVSSSSHLLGTKLGPEIERAECTIRMNDAPTTGYSADVGNKTTYRVVAHSSVFRVLRRPQEFVNRTPETVFIFWGPPSKMQKPQGSLVRVIQRAGLVFPNMEAYAVSPGRMRQFDDLFRGETGKDREKSHSWLSTGWFTMVIAVELCDHVHVYGMVPPNYCSQRPRLQRMPYHYYEPKGPDECVTYIQNEHSRKGNHHRFIREKGLLIVGPAVWHHLLPPLLDLGHPACGTSGGSEEKQPPPSR

SEQ ID NO: 3449 - protein, 328 aa, Homo sapiens
MLPRVGCPALPLPPPPLLPLLPLLLLLLGASGGGGGARAEVLFRCPPCTPERLAACGPPPVAPPAAVAAVAGGARMPCAELVREPGCGCCSVCARLEGEACGVYTPRCGQGLRCYPHPGSELPLQALVMGEGTCEKRRDAEYGASPEQVADNGDDHSEGGLVENHVDSTMNMLGGGGSAGRKPLKSGMKELAVFREKVTEQHRQMGKGGKHHLGLEEPKKLRPPPARTPCQQELDQVLERISTMRLPDERGPLEHLYSLHIPNCDKHGLYNLKQCKMSLNGQRGECWCVNPNTGKLIQGAPTIRGDPECHLFYNEQQEARGVHTQRMQ

SEQ ID NO: 3450 - protein, 112 aa, Homo sapiens
  SITE (2): Xaa equals any amino acid
AXRVGLGLSGPLLKFGPVQTSSRAPSQAHAQVQAQAGRDPLGSQLASMELLPPLPQSFLLLLLLPAKPAAGEDWQCPRTPYAASRDFDVKYVVPSFSAGAWYSHGDLRGRQK

SEQ ID NO: 3451 - protein, 110 aa, Homo sapiens
PRVREMRLLLALLGILLSVPGPPVLSLEASEEVELGMASEVGEGGRGGKSGHQEGAAGLSKAGKDPCPGPEKVAAGQGSTTETQSVPGFQQAFIYHCVCERGLALQGAGP

SEQ ID NO: 3452 - protein, 386 aa, Homo sapiens
MGLWGQSVPTASSARAGRYPGARTASGTRPWLLDPKILKFVVFIVAVLLPVRVDSATIPRQDEVPQQTVAPQQQRRSLKEEECPAGSHRSEYTGACNPCTEGVDYTIASNNLPSCLLCTVCKSGQTNKSSCTTTRDTVCQCEKGSFQDKNSPEMCRTCRTGCPRGMVKVSNCTPRSDIKCKNESAASSTGKTPAAEETVTTILGMLASPYHYLIIIVVLVIILAVVVVGFSCRKKFISYLKGICSGGGGGPERVHRVLFRRRSCPSRVPGAEDNARNETLSNRYLQPTQVSEQEIQGQELAELTGVTVESPEEPQRLLEQAEAEGCQRRRLLVPVNDADSADISTLLDASATLEEGHAKETIQDQLVGSEKLFYEEDEAGSATSCL

SEQ ID NO: 3453 - protein, 131 aa, Homo sapiens
MKIFLPVLLAALLGVERASSLMCFSCLNQKSNLYCLKPTICSDQDNYCVTVSASAGIGNLVTFGHSLSKTCSPACPIPEGVNVGVASMGISCCQSFLCNFSAADGGLRASVTLLGAGLLLSLLPALLRFGP

SEQ ID NO: 3454 - protein, 163 aa, Homo sapiens
PPLLPELPAGVEGVALALGRYFHRCRDSRAVGSKVVLALGRYLSLASWWVQGHQGHLPNQSLFDLGRALENTGTQDREVPTSSPWFASGCKNLSGLPSQADCETRPLHPPVVDFWSPSLEGREAMSSSGKYERNCQKQMGSKLRSQTPQLKTCGTSVGTLSRV

SEQ ID NO: 3455 - protein, 111 aa, Homo sapiens
MGSSSFLVLMVSLVLVTLVAVEGVKEGIEKAGVCPADNVRCFKSDPPQCHTDQDCLGERKCCYLHCGFKCVIPVKELEEGGNKDEDVSRPYPEPGWEAKCPGSSSTRCPQK

SEQ ID NO: 3456 - protein, 112 aa, Homo sapiens
MARGSLRRLLRLLVLGLWLALLRSVAGEQAPGTAPCSRGSSWSADLDKCMDCSTSCPLPAALAHPWGRSEPDLRAGAAFWLFGLETMPQREKFTTPIEETGGEGCPAVALIQ

SEQ ID NO: 3457 - protein, 45 aa, Homo sapiens
MVCVLDFLMAIISMLMDLMTGIAWAYHLIGKGLEPFFFMALLFLR

SEQ ID NO: 3458 - protein, 107 aa, Homo sapiens
  SITE (91): Xaa equals any amino acid
  SITE (92): Xaa equals any amino acid
  SITE (93): Xaa equals any amino acid
  SITE (102): Xaa equals any amino acid
MGFGATLAVGWTIFVLSVVTIIICFTCSCCCLYKTCRRPRPVVTTTTSTTVGACPLSSASKCAAQLPWTKLPGLPHHAASARNASSTLPNXXXPPLYPAQPXGPNPA

SEQ ID NO: 3459 - protein, 211 aa, Homo sapiens
  SITE (187): Xaa equals any amino acid
MPALWLGCCLCFSLLLPAARATSRREVCDCNGKSRQCIFDRELHRQTGNGFRCLNCNDNTDGIHCEKCKNGFYRHRERDRCLPCNCNSKGSLSARCDNSGRCSCKPGVTGARCDRCLPGFHMLTDAGCTQDQRLLDSKCDCDPAGIAGPCDAGRCVCKPAVTGERCDRCRSGYYNLDGGNPEGCTQXFCMASASCRTLQKQCLRHSTFIKM

SEQ ID NO: 3460 - protein, 56 aa, Homo sapiens
  SITE (44): Xaa equals any amino acid
  SITE (47): Xaa equals any amino acid
  SITE (56): Xaa equals any amino acid
MQLLLLTCLLQLIMVTNKAIASQISQIKHFFHCHLVVVCPNSSXNLXSPGSIPALX

SEQ ID NO: 3461 - protein, 35 aa, Homo sapiens
PLPAVVCLPDQELPTLFPKVTGFSRAQIPNTVLLV

SEQ ID NO: 3462 - protein, 25 aa, Homo sapiens
  SITE (11): Xaa equals any amino acid
RVALISLFCGXFAFPVFAHPETLVK

SEQ ID NO: 3463 - protein, 1103 aa, Homo sapiens
  SITE (523): Xaa equals any amino acid
  SITE (1091): Xaa equals any amino acid
MGLAWGLGVLFLMHVCGTNRIPESGGDNSVFDIFELTGAARKGSGRRLVKGPDPSSPAFRIEDANLIPPVPDDKFQDLVDAVRAEKGFLLLASLRQMKKTRGTLLALERKDHSGQVFSVVSNGKAGTLDLSLTVQGKQHVVSVEEALLATGQWKSITLFVQEDRAQLYIDCEKMENAELDVPIQSVFTRDLASIARLRIAKGGVNDNFQGVLQNVRFVFGTTPEDILRNKGCSSSTSVLLTLDNNVVNGSSPAIRTNYIGHKTKDLQAICGISCDELSSMVLELRGLRTIVTTLQDSIRKVTEENKELANELRRPPLCYHNGVQYRNNEEWTVDSCTECHCQNSVTICKKVSCPIMPCSNATVPDGECCPRCWPSDSADDGWSPWSEWTSCSTSCGNGIQQRGRSCDSLNNRCEGSSVQTRTCHIQECDKRFKQDGGWSHWSPWSSCSVTCGDGVITRIRLCNSPSPQMNGKPCEGEARETKACKKDACPINGGWGPWSPWDICSVTCGGGVQKRSRLCNNPXPQFGGKDCVGDVTENQICNKQDCPIDGCLSNPCFAGVKCTSYPDGSWKCGACPPGYSGNGIQCTDVDECKEVPDACFNHNGEHRCENTDPGYNCLPCPPRFTGSQPFGQGVEHATANKQVCKPRNPCTDGTHDCNKNAKCNYLGHYSDPMYRCECKPGYAGNGIICGEDTDLDGWPNENLVCVANATYHCKKDNCPNLPNSGQEDYDKDGIGDACDDDDDNDKIPDDRDNCPFHYNPAQYDYDRDDVGDRCDNCPYNHNPDQADTDNNGEGDACAADIDGDGILNERDNCQYVYNVDQRDTDMDGVGDQCDNCPLEHNPDQLDSDSDRIGDTCDNNQDIDEDGHQNNLDNCPYVPNANQADHDKDGKGDACDHDDDNDGIPDDKDNCRLVPNPDQKDSDGDGRGDACKDDFDHDSVPDIDDICPENVDISETDFRRFQMIPLDPKGTSQNDPNWVVRHQGKELVQTVNCDPGLAVGYDEFNAVDFSGTFFINTERDDDYAGFVFGYQSSSRFYVVMWKQVTQSYWDTNPTRAQGYSGLSVKVVNSTTGPGEHLRNALWHTGNTPGQVXTLEQRESLWVPD

SEQ ID NO: 3464 - protein, 239 aa, Homo sapiens
MVLEEIWTSLFMWFFYALIPCLLTDEVAILPAPQNLSVLSTNMKHLLMWSPVIAPGETVYYSVEYQGEYESLYTSHIWIPSSWCSLTEGPECDVTDDITATVPYNLRVRATLGSQTSAWSILKHPFNRNSTILTRPGMEITKDGFHLVIELEDLGPQFEFLVAYWRREPGAEEHVKMVRSGGIPVHLETMEPGAAYCVKAQTFVKAIGRYSAFSQTECVEVQERPFPWYWPCLPLLASC

SEQ ID NO: 3465 - protein, 335 aa, Homo sapiens
MAARWRFWCVSVTMVVALLIVCDVPSASAQRKKEMVLSEKVSQLMEWTNKRPVIRMNGDKFRRLVKAPPRNYSVIVMFTALQLHRQCVVCKQADEEFQILANSWRYSSAFTNRIFFAMVDFDEGSDVFQMLNMNSAPTFINFPAKGKPKRGDTYELQVRGFSAEQIARWIADRTDVNIRVIRPPNYAGPLMLGLLLAVIGGLVYLRRSNMEFLFNKTGWAFAALCFVLAMTSGQMWNHIRGPPYAHKNPHTGHVNYIHGSSQAQFVAETHIVLLFNGGVTLGMVLLCEAATSDMDIGKRKIMCVAGIGLVVLFFSWMLSIFRSKYHGYPYSFLMS

SEQ ID NO: 3466 - protein, 80 aa, Homo sapiens
MDRGSRCRRLPARGLTTAWLAAALWRTSRTETGLCFPRVFTRPPSYTWKFQNPLWGASCLGRLFKCGPLWSQPSFPTPSP

SEQ ID NO: 3467 - protein, 258 aa, Homo sapiens
MAVLAPLIALVYSVPRLSRWLAQPYYLLSALLSAAFLLVRKLPPLCHGLPTQREDGNPCDFDWREVEILMFLSAIVMMKNRRSMFLMTCKPPLYMGPEYIKYFNDKTIDEELERDKRVTWIVEFFANWSNDCQSFAPIYADLSLKYNCTGLNFGKVDVGRYTDVSTRYKVSTSPLTKQLPTLILFQGGKEAMRRPQIDKKGRAVSWTFSEENVIREFNLNELYQRAKKLSKAGDNIPEEQPVASTPTTVSDGENKKDK

SEQ ID NO: 3468 - protein, 25 aa, Homo sapiens
  SITE (11): Xaa equals any amino acid
RVALISLFCGXFAFPVFAHPETLVK

SEQ ID NO: 3469 - protein, 193 aa, Homo sapiens
MAAEPVEDNCINFVAMKFIDNTLYFIAEDDENLESDYFGKLESKLSVIRNLNDQVLFIDQGNRPLFEDMTDSDCRDNAPRTIFIISMYKDSQPRGMAVTISVKCEKISTLSCENKIISFKEMNPPDNIKDTKSDIIFFQRSVPGHDNKMQFESSSYEGYFLACEKERDLFKLILKKEDELGDRSIMFTVQNED

SEQ ID NO: 3470 - protein, 246 aa, Homo sapiens
MAAAAIPALLLCLPLLFLLFGWSRARRDDPHSLCYDITVIPKFRPGPRWCAVQGQVDEKTFLHYDCGNKTVTPVSPLGKKLNVTMAWKAQNPVLREVVDILTEQLLDIQLENYTPKEPLTLQARMSCEQKAEGHSSGSWQFSIDGQTFLLFDSEKRMWTTVHPGARKMKEKWENDKDVAMSFHYISMGDCIGWLEDFLMGMDSTLEPSAGAPLAMSSGTTQLRATATTLILCCLLIILPCFILPGI

SEQ ID NO: 3471 - protein, 145 aa, Homo sapiens
  SITE (97): Xaa equals any amino acid
  SITE (101): Xaa equals any amino acid
  SITE (107): Xaa equals any amino acid
  SITE (110): Xaa equals any amino acid
  SITE (111): Xaa equals any amino acid
MSIQHFRVALIPFFAAFCLPVFAHPETLVKVKDAEDQLGARVGYIELDLNSGKILESFRPEERFPMMSTFKVLLCGAVLSRIDAGQEQLGRRIHYSXNDLXEYSPVXEKXXTDGMTVRELCSAAITMSDNTAANLLLTTIGGPKS

SEQ ID NO: 3472 - protein, 40 aa, Homo sapiens
  SITE (2): Xaa equals any amino acid
TXFPSDEIPTILLRSNGLPTSKGGFEASKDSRLRNGSHIP

SEQ ID NO: 3473 - protein, 79 aa, Homo sapiens; identical to SEQ ID NO: 3272

SEQ ID NO: 3474 - protein, 54 aa, Homo sapiens; identical to SEQ ID NO: 3217

SEQ ID NO: 3475 - protein, 207 aa, Homo sapiens
MSTKPDMIQKCLWLEILMGIFIAGTLSLDCNLLNVHLRRVTWQNLRHLSSMSNSFPVECLRENIAFELPQEFLQYTQPMKRDIKKAFYEMSLQAFNIFSQHTFKYWKERHLKQIQIGLDQQAEYLNQCLEEDENENEDMKEMKENEMKPSEARVPQLSSLELRRYFHRIDNFLKEKKYSDCAWEIVRVEIRRCLYYFYKFTALFRRK

SEQ ID NO: 3476 - protein, 207 aa, Homo sapiens
MGRPRPRAAKTWMFLLLLGGAWAGHSRAQEDKVLGGHECQPHSQPWQAALFQGQQLLCGGVLVGGNWVLTAAHCKKPKYTVRLGDHSLQNKDGPEQEIPVVQSIPHPCYNSSDVEDHNHDLMLLQLRDQASLGSKVKPISLADHCTQPGQKCTVSGWGTVTSPRETGFRHVDQAGLELLTSSDLPASAYQSAGITSMSHRPWPFSPS

SEQ ID NO: 3477 - protein, 113 aa, Homo sapiens
  SITE (81): Xaa equals any amino acid
MGTSPASSLVGFGVSTGSQAFDATSVRTTSLLPWTLPVTLALRFLVSKALGRFLRRTDSSFEGLSRAFHSPRCQSSQGKQXQEGEEAAGLHGEGRSDSPFCRLLAGRVGGRVG

SEQ ID NO: 3478 - protein, 8 aa, Homo sapiens
  SITE (5): Xaa equals any amino acid
  SITE (6): Xaa equals any amino acid
  SITE (7): Xaa equals any amino acid
MRRIXXXI

SEQ ID NO: 3479 - protein, 47 aa, Homo sapiens
MSHRAWPPLLLSTAFSFFFGKLPACSLARTAGKLVHQSRLSPPDLRS

SEQ ID NO: 3480 - protein, 87 aa, Homo sapiens
FLYFFLVKTGFCHVCQAGLELLTSSDPPDSASQSAGITGVSQHAWPIFKRLLLFIFLFFELLQDSAQVLLLYPLKYPTQSKTCCQIN

SEQ ID NO: 3481 - protein, 86 aa, Homo sapiens [sequence omitted]

SEQ ID NO: 3482 - protein, 67 aa, Homo sapiens
  SITE (13): Xaa equals any amino acid
  SITE (28): Xaa equals any amino acid
MLTCHFKNPRALXNYATSPLPVLHKWNXKAWMTVHLMTALLTEYFKPTIKTYTYHNTTGSLTTHLLT

SEQ ID NO: 3483 - protein, 41 aa, Homo sapiens
MCYEFANSWTVRLLFFQMFLLCLPFPSSPLLFLPSFLSLEH

SEQ ID NO: 3484 - protein, 58 aa, Homo sapiens
MGFGFVLNIFFFFSFPSFMTFGTLGIPSQLSTINVTPWTLLLLVVLSNFCDRETNSFE

SEQ ID NO: 3485 - protein, 40 aa, Homo sapiens
MEPITYVPLSIRSPFVSIFYWILPLCFCLVLPCYTFSCLG

SEQ ID NO: 3486 - protein, 81 aa, Homo sapiens
MRTAWTFPWTFLHPLAQAREGEGATYPRSLCRFFGIGCMSTVTMPILQSKKKRCCPSKHTCLRYRSVTGSSTPAAGSSLTC

SEQ ID NO: 3487 - protein, 180 aa, Homo sapiens
MAPGVARGPTPYWRLRLGGAALLLLLIPVAAAQEPPGAACSQNTNKTCEECLKNVSCLWCNTNKACLDYPVTSVLPPASLCKLSSARWGVCWVNFEALIITMSVVGGTLLLGIAICCCCCCRRKRSRKPDRSEEKAMREREERRIRQEERRAEMKTRHDEIRKKYGLFKEENPYARFENN

SEQ ID NO: 3488 - protein, 98 aa, Homo sapiens; identical to SEQ ID NO: 2948

SEQ ID NO: 3489 - protein, 610 aa, Homo sapiens
MASRFSRVVLVLIDALRFDFAQPQHSHVPREPPVSLPFLGKLSSLQRILEIQPHHARLYRSQVDPPTTTMQRLKALTTGSLPTFIDAGSNFASHAIVEDNLIKQLTSAGRRVVFMGDDTWKDLFPGAFSKAFFFPSFNVRDLDTVDNGILEHLYPTMDSGEWDVLIAHFLGVDHCGHKHGPHHPEMAKKLSQMDQVIQGLVERLENDTLLVVAGDHGMTTNGDHGGDSELEVSAALFLYSPTAVFPSTPPEEPEVIPQVSLVPTLALLLGLPIPFGNIGEVMAELFSGGEDSQPHSSALAQASALHLNAQQVSRFLHTYSAATQDLQAKELHQLQNLFSKASADYQWLLQSPKGAEATLPTVIAELQQFLRGARAMCIESWARFSLSFLLLHLLAAGIPVTTPGPFTVPWQAVSAWALMATQTFYSTGHQPVFPAIHWHAAFVGFPEGHGSCTWLPALLVGANTFASHLLFAVGCPLLLLWPFLCESQGLRKRQQPPGNEADARVRPEEEEEPLMEMRLRDAPQHFYAALLQLGLKYLFILGIQILACALAASILRRHLMVWKVFAPKFIFEAVGFIVSSVGLLLGIALVMRVDGAVSSWFRQLFLAQQR

SEQ ID NO: 3490 - protein, 177 aa, Homo sapiens
MEICRGLRSHLITLLLFLFHSETICRPSGRKSSKMQAFRIWDVNQKTFYLRNNQLVAGYLQGPNVNLEEKIDVVPIEPHALFLGIHGGKMCLSCVKSGDETRLQLEAVNITDLSENRKQDKRFAFIRSDSGPTTSFESAACPGWFLCTAMEADQPVSLTNMPDEGVMVTKFYFQEDE

SEQ ID NO: 3491 - protein, 51 aa, Homo sapiens
MLLLFLICWVVLMVQFLFTHSNPELHAKRLGACVFTWVFFHQPRKLFLKAP

SEQ ID NO: 3492 - protein, 71 aa, Homo sapiens
MSMLVVFLLLWGVTWGPVTEAAIFYETQPSLWAESESLLKPLANVTLTCQARLETPDFQLFKNGVAQTCAP

SEQ ID NO: 3493 - protein, 43 aa, Homo sapiens
MVIRYHLLVMYQALVSGILPSLYSYLHRSTRKLNHPPFTDLGI

SEQ ID NO: 3494 - protein, 357 aa, Homo sapiens; identical to SEQ ID NO: 3106

SEQ ID NO: 3495 - protein, 223 aa, Homo sapiens
MNKPLLWISVLTSLLEAFAHTDLSGKVFVFPRESVTDHVNLITPLEKPLQNFTLCFRAYSDLSRAYSLFSYNTQGRDNELLVYKERVGEYSLYIGRHKVTSKVIEKFPAPVHICVSWESSSGIAEFWINGTPLVKKGLRQGYFVEAQPKIVLGQEQDSYGGKFDRSQSFVGEIGDLYMWDSVLPPENILSAYQGTPLPANILDWQALNYEIRGYVIIKPLVWV

SEQ ID NO: 3496 - protein, 89 aa, Homo sapiens
MGVLLVSMVVLFIFAILCIFIRNRILEIVYASLGALLFTCFLAVDTQLLLGNKQLSLSPEEYVFAALNLYTDIINIFLYILTIIGRAKE

SEQ ID NO: 3497 - protein, 189 aa, Homo sapiens
GLSRIFILAHFPHQVLAGLITGAVLGWLMTPRVPMERELSFYGLTALALMLGTSLIYWTLFTLGLDLSWSISLAFKWCERPEWIHVDSRPFASLSRDSGAALGLGIALHSPCYAQVRRAQLGNGQKIACLVLAMGLLGPLDWLGHPPQISLFYIFNFLKYTLWPCLVLALVPWAVHMFSAQEAPPIHSS

SEQ ID NO: 3498 - protein, 499 aa, Homo sapiens
MKHSLNALLIFLIITSAWGGSKGPLDQLEKGGETAQSADPQWEQLNNKNLSMPLLPADFHKENTVTNDWIPEGEEDDDYLDLEKIFSEDDDYIDIVDSLSVSPTDSDVSAGNILQLFHGKSRIQRLNILNAKFAFNLYRVLKDQVNTFDNIFIAPVGISTAMGMISLGLKGETHEQVHSILHFKDFVNASSKYEITTIHNLFRKLTHRLFRRNFGYTLRSVNDLYIQKQFPILLDFKTKVREYYFAEAQIADFSDPAFISKTNNHIMKLTKGLIKDALENIDPATQMMILNCIYFKGSWVNKFPVEMTHNHNFRLNEREVVKVSMMQTKGNFLAANDQELDCDILQLEYVGGISMLIVVPHKMSGMKTLEAQLTPRVVERWQKSMTNRTREVLLPKFKLEKNYNLVESLKLMGIRMLFDKNGNMAGISDQRIAIDLFKHQGTITVNEEGTQATTVTTVGFMPLSTQVRFTVDRPFLFLIYEHRTSCLLFMGRVANPSRS

SEQ ID NO: 3499 - protein, 54 aa, Homo sapiens
MVLLRKLCLPMLCFLLHTILHSTGQYQECLQLADMVSSERHKLYLVFSKEELPP

SEQ ID NO: 3500 - protein, 147 aa, Homo sapiens
MVMGLGVLLLVFVLGLGLTPPTLAQDNSRYTHFLTQHYDAKPQGRDDRYCESIMRRRGLTSPCKDINTFIHGNKRSIKAICENKNGNPHRENLRISKSSFQVTTCKLHGGSPWPPCQYRATAGFRNVVVACENGLPVHLDQSIFRRP

SEQ ID NO: 3501 - protein, 264 aa, Homo sapiens
MAAAAVARLWWRGILGASALTRGTGRPSVLLLPVRRESAGADTRPTVRPRNDVAHKQLSAFGEYVAEILPKYVQQVQVSCFNELEVCIHPDGVIPVLTFLRDHTNAQFKSLVDLTAVDVPTRQNRFEIVYNLLSLRFNSRIRVKTYTDELTPIESAVSVFKAANWYEREIWDMFGVFFANHPDLRRILTDYGFEGHPFRKDFPLSGYVELRYDDEVKRVVAEPVELAQEFRKFDLNSPWEAFPVYRQPPESLKLEAGDKKPDAK

SEQ ID NO: 3502 - protein, 180 aa, Homo sapiens; identical to SEQ ID NO: 3162

SEQ ID NO: 3503 - protein, 140 aa, Homo sapiens
MFAGLFFLFFVRFGIGRQLLIKFPWFFSFGYFSKQGPTQKQIDAASFTLTFFGQGYSQGTGTDKNKPNIKICTQVKGPEAGYVATPIAMVQAAMTLLSDASHLPKAGGVFTPGAAFSKTKLIDRLNKHGIEFSVISSSEV

SEQ ID NO: 3504 - protein, 147 aa, Homo sapiens; identical to SEQ ID NO: 3500

SEQ ID NO: 3505 - protein, 546 aa, Homo sapiens
  SITE (203): Xaa equals any amino acid
  SITE (349): Xaa equals any amino acid
  SITE (469): Xaa equals any amino acid
  SITE (514): Xaa equals any amino acid
MKALIAALLLITLQYSCAVSPTDCSAVEPEEKALDLINKRRRDGYLFQLLRIADAHLDRVENTTVYYLVLDVQESDCSVLSRKYWNDCEPPDSRRPSEIVIGQCKVIATRHSHESQDLRVIDFNCTTSSVSSALANTKDSPVLIDFFEDTERYRKQANKALEKYKEENDDFASFRVDRIERVARVRGGEGTGYFVDFSVRNCXRHHFPRHPNVFGFCRADLFYDVEALDLESPKNLVINCEVFDPQEHENINGVPPHLGHPFHWGGHERSSTTKPPFKPHGSRDHHHPHKPHEHGPHNQGHCCHGHGPPPGHLRRRGPGKGPRPFHCRQIGSVYRLPPPLLPMSCSSCXHATFGTNGAQRRSHNNNSSDLHPHKHHSHEQHPHGHHPHAHHPHEHDTHRQHPHGHHPHGHHPHGHHPHGHHPHGHHPHCHDFQDYGPCDPPPHNQGHCCHGHGPPPGHLRRRGPGKGPXPFHCRQIGSVYRLPPLRKGEVLPLPEANFPSFPLPHHKHPLKPDXQPFPQSVSESCPGKFKSGFPQVSMFFTHTFPK

SEQ ID NO: 3506 - protein, 546 aa, Homo sapiens; identical to SEQ ID NO: 3505
  SITE (203): Xaa equals any amino acid
  SITE (349): Xaa equals any amino acid
  SITE (469): Xaa equals any amino acid
  SITE (514): Xaa equals any amino acid

SEQ ID NO: 3507 - protein, 151 aa, Homo sapiens
MFSTKALLLAGLISTALAGPWANICAGKSSNEIRTCDRHGCGQYSAQRSQRPHQGVDVLCSAGSTVYAPFTGMIVGQEKPYQNKNAINNGVRISGRGFCVKMFYIKPIKYKGPIKKGEKLGTLLPLQKVYPGIQSHVHIENCDSSDPTAYL

SEQ ID NO: 3508 - protein, 46 aa, Homo sapiens
MSGGEGAALPILLLLLALRGTFHGARPGGGASGIWCLLLPEQEPPV

SEQ ID NO: 3509 - protein, 429 aa, Homo sapiens
MCPGALWVALPLLSLLAGSLQGKPLQSWGRGSAGGNAHSPLGVPGGGLPEHTFNLKMFLENVKVDFLRSLNLSGVPSQDKTRVEPPQYMIDLYNRYTSDKSTTPASNIVRSFSMEDAISITATEDFPFQKHILLFNISIPRHEQITRAELRLYVSCQNHVDPSHDLKGSVVIYDVLDGTDAWDSATETKTFLVSQDIQDEGWETLEVSSAVKRWVRSDSTKSKNKLEVTVESHRKGCDTLDISVPPGSRNLPFFVVFSNDHSSGTKETRLELREMISHEQESVLKKLSKDGSTEAGESSHEEDTDGHVAAGSTLARRKRSAGAGSHCQKTSLRVNFEDIGWDSWIIAPKEYEAYECKGGCFFPLADDVTPTKHAIVQTLVHLKFPTKVGKACCVPTKLSPISVLYKDDMGVPTLKYHYEGMSVAECGCR

SEQ ID NO: 3510 - protein, 108 aa, Homo sapiens
MKLLSLVAVVGCLLVPPAEANKSSEDIRCKCICPPYRNISGHIYNQNVSQKDCNCLHVVEPMPVPGHDVEAYCLLCECRYEERTPPPSRSSLSSTCPWWVPCCSTWPS

SEQ ID NO: 3511 - protein, 299 aa, Homo sapiens
MGTKAQVERKLLCLFILAILLCSLALGSVTVHSSEPEVRIPENNPVKLSCAYSGFSSPRVEWKFDQGDTTRLVCYNNKITASYEDRVTFLPTGITFKSVTREDTGTYTCMVSEEGGNSYGEVKVKLIVLVPPSKPTVNIPSSATIGNRAVLTCSEQDGSPPSEYTWFKDGIVMPTNPKSTRAFSNSSYVLNPTTGELVFDPLSASDTGEYSCEARNGYGTPMTSNAVRMEAVERNVGVIVAAVLVTLILLGILVFGIWFAYSRGHFDRTKKGTSSKKVIYSQPSARSEGEFKQTSSFLV

SEQ ID NO: 3512 - protein, 45 aa, Homo sapiens
MWAASWCLSLWCCWVWSGTSESITANSSQHLPLSPWWESPSSSAS

SEQ ID NO: 3513 - protein, 72 aa, Homo sapiens
LLHSWLKLNLGKGFQCIKQWAASPQSSLTIRCVDFSSKRLVAFAWDQCSLLMFLLVSRHIPVALRLERLVDV

SEQ ID NO: 3514 - protein, 321 aa, Homo sapiens
MQCRLPRGLAGALLTLLCMGLLCLRYHLNLSPQRVQGTPELSQPNPGPPKLQLHDVFIAVKTTRAFHRLRLELLLDTWVSRTREQTFVFTDSPDKGLQERLGSHLVVTNCSAEHSHPALSCKMAAEFDTFLASGLRWFCHVDDDNYVNPRALLQLLRAFPLARDVYVGRPSLNRPIHASEPQPHNRTRLVQFWFATGGAGFCINRKLALKMAPWASGSRFMDTSALIRLPDDCTMGYIIECKLGGRLQPSPLFHSHLETLQLLRTAQLPEQVTLSYGVFEGKLNVIKLQGPFSPEEDPSRFRSLHCLLYPDTPWCPQLGAR

SEQ ID NO: 3515 - protein, 31 aa, Homo sapiens
MAVLLRLVYHFWASATCPDVGHVRAEPVLHK

SEQ ID NO: 3516 - protein, 180 aa, Homo sapiens
MQLCWVILGFLLFRGHNSQPTMTQTSSSQGGLGGLSLTTEPVSSNPGYIPSSEANRPSHLSSTGTPGAGVPSSGRDGGTSRDTFQTVPPNSTTMSLSMREDATILPSPTSETVLTVAAFGVISFIVILVVVVIILVGVVSLRFKCRKSRSLKIPRNLGVQGCLKAAPQPMERRQHHPYLP

SEQ ID NO: 3517 - protein, 62 aa, Homo sapiens
MLLGLFMKGVILGQAGGSGLHGSLKLLLILTFSLATFRQRIRQSILGALSFTIDIYLYHLFV

SEQ ID NO: 3518 - protein, 93 aa, Homo sapiens
  SITE (68): Xaa equals any amino acid
MLQGPGSLLLLFLASHCCLGSARGLFLFGQPDFSYKRSNCKPIPVNLQLCHGIEYQNMRLPNLLGHEXTSCQPPRKLQRYVKPAKIKMMMTTT

SEQ ID NO: 3519 - protein, 58 aa, Homo sapiens
MIGLHGYQNSRLWVIFFLLLLFSGSSDITNKRSQEYLSLFDIYVLRGVTLSSCEILIR

SEQ ID NO: 3520 - protein, 519 aa, Homo sapiens
MQGGQRPHLLLLLLAVCLGAQSRNQEERLLADLMRNYDPHLRPAERDSDVVNVSLKLTLTNLISLNEREEALTTNVWIEMQWCDYRLRWDPKDYEGLWILRVPSTMVWRPDIVLENNVDGVFEVALYCNVLVSPDGCIYWLPPAIFRSSCSISVTYFPFDWQNCSLIFQSQTYSTSEINLQLSQEDGQAIEWIFIDPEAFTENGEWAIRHRPAKMLLDSVAPAEKAGHQKVVFYLLIQRKPLFYVINIIAPCVLISSVAILIYFLPAKAGGQKCTVATNVLLAQTVFLFLVAKKVPETSQAVPLISKYLTFLMVVTILIVVNSVVVLNVSLRSPHTHSMARGVRKVFLRLLPQLLRMHVRPLAPAAVQDARFRLQNGSSSGWPIMAREEGDLCLPRSELLFRQRQRNGLVQAVLEKLENGPEVRQSQEFCGSLKQASPAIQACVDACNLMARARRQQSHFDSGNEEWLLVGRVLDRVCFLAMLSLFICGTAGIFLMAHYNQVPDLPFPGDPRPYLPLPD

SEQ ID NO: 3521 - protein, 117 aa, Homo sapiens
NSGSTTRPDPRVRPRVRVSWSFHKLKTMKHLLLLLLCVFLVKSQGVNDNEEGFFSARGHRPLDKKREEAPSLRPAPPPISGGGYRARPAKAAATQKKVERKAPDAGGFATTGKANQK

SEQ ID NO: 3522 - protein, 312 aa, Homo sapiens
MSGDLGWLLNLFHNQIESKFQKVLESRICEMIQKSVSSDLQPYLQTLPVTTEIDSFADIDYSLVEAPRATAQMLEVMFKGEIFHRNHRSPVTLLAAVMSLPEEHNKMVYFAISDYVFNTASLVYHEEGYLNFSITDDMIPPDSNIRLTTKSFRPFVPRLARLYPNMNLELQGSVPSAPLLNFSPGNLSVDPYMEIDAFVLLPSSSKEPVFRLSVATNVSATLTFNTSKITGFLKPGKVKVELKESKVGLFNAELLEALLNYYILNTFYPKFNDKLAEGFPLPLLKRVQLYDLGLQIHKDFLFLGANVQYMRV

SEQ ID NO: 3523 - protein, 123 aa, Homo sapiens
KVRLQVPVRNSRVDPRVLRAGQDLPTKPSSKDSECPSGLAMRLFLSLPVLVVVLSIVLEGPAPAQGTPDVSSALDKLKEFGNTLEDKARELISRIKQSELSAKMREWFSETFQKVKEKLKIDS

SEQ ID NO: 3524 - protein, 70 aa, Homo sapiens; identical to SEQ ID NO: 3378

SEQ ID NO: 3525 - protein, 60 aa, Homo sapiens
MLICTLLEFCLAVLTAVLRWKQAYSDFPGSVLFLPHSYIGNSGMSSKMTHDCGYEELLTS

SEQ ID NO: 3526 - protein, 55 aa, Homo sapiens
SFSQQLHSFQKLRYIPYEYQHCDICVANYFLWNHSFNFTSCCLGRLCREHIFNRL

SEQ ID NO: 3527 - protein, 101 aa, Homo sapiens
MPRPAPARRLPGLLLLLWPLLLLPSAAPDPVARPGFRRLETRGPGGSPGRRPSPAAPDGAPASGTSEPGRARGAGVCKSRPLDLVFIIDSSRSVRPWNSPK

SEQ ID NO: 3528 - protein, 142 aa, Homo sapiens
  SITE (121): Xaa equals any amino acid
MRCLTTPMLLRALAQAARAGPPGGRSLHSSAVAATYKYVNMQDPEMDMKSVTDRAARTLLWTELFRGLGMTLSYLFREPATINYPFEKGPLSPRFRGEHALRRYPSGEERCIACKLCEAIXPRQAITIEAEPRLMAAGGHPL

SEQ ID NO: 3529 - protein, 82 aa, Homo sapiens
MPSCLLLFWILHAVASHLLWEQCLCAGYMYAPHVHTRVSVQLTSRCAVGKLEGGPCFSVVTQHLSLFLFSCPLIFSQPVSGG

SEQ ID NO: 3530 - protein, 199 aa, Homo sapiens [sequence omitted]

SEQ ID NO: 3531 - protein, 136 aa, Homo sapiens
MMISIVGFLSPFNMILGGIVVVLVFTGFVWAAHNKDVLRRMKKRYPTTFVMVVMLASYFLISMFGGVMVFVFGITFPLLLMFIHASLRLRNLKNKLENKMEGIGLKRTPMGIVLDALEQQEEGINRLTDYISKVKE

SEQ ID NO: 3532 - protein, 7 aa, Homo sapiens
PRRLLQL

SEQ ID NO: 3533 - protein, 93 aa, Homo sapiens
MIHLGHILFLLLLPVAAAQTTPGERSSLPAFYPGTSGSCSGCGSLSLPLLAGLVAADAVASLLIVGAVFLCARPRRSPAQEDGKVYINMPGRG

SEQ ID NO: 3534 - protein, 67 aa, Homo sapiens
MPSMSSLLWRWVSPWLGSCQNCTPLLSTATSYGVREVDQVKPHKAQDLARGQAKHQRDGHRGPWPTR

SEQ ID NO: 3535 - protein, 29 aa, Homo sapiens
MRGFLCVLICLLCLLTLLTVSIGSENSFF

SEQ ID NO: 3536 - protein, 126 aa, Homo sapiens
ARGGQCGLQTRSGLWSRTLCSMLAFMCVLVVLLTTCQAILSTFKTGARGKVKCQGLLLLFQENDRLGAVLTPVILPKCWYYRREQCVWPDPVFTKNGKTLSLLKIQRNPKLVRCGGTFLCPSYLGG

SEQ ID NO: 3537 - protein, 57 aa, Homo sapiens [sequence omitted]

SEQ ID NO: 3538 - protein, 93 aa, Homo sapiens
PLLISVASSLILSHSGPVNHPCHASCSSLNVHIDHFFLSFDPGDFSARGTAQPTYLVHLYTSFPKFVFNVTCSLEPFLTSLQCGQSELLTPPF

SEQ ID NO: 3539 - protein, 75 aa, Homo sapiens
MVVSLVLGFLAMFVATMGMKCTRCGGDDKVKKARIAMGGGIIFIVAGLAALVACSWYGHQIVTDFYNPLIPTNIK

SEQ ID NO: 3540 - protein, 152 aa, Homo sapiens [sequence omitted]

SEQ ID NO: 3541 - protein, 125 aa, Homo sapiens
MRTQQKRDTKFREDCPPDREELGRHSWAVLHTLAAYYPDLPTPEQQQDMAQFIHLFSKFYPCEECAEDLRKRLCRNHPDTRTRACFTQWLCHLHNEVNRKLGKPDFDCSKVDERWRDGWKDGSCD

SEQ ID NO: 3542 - protein, 234 aa, Homo sapiens
MPASSPFLLAPKGPPGNMGGPVREPALSVALWLSWGAALGAVACAMALLTQQTELQSLRREVSRLQRTGGPSQNGEGYPWQSLPEQSSDALEAWESGERSRKRRAVLTQKQKNDSDVTEVMWQPALRRGRGLQAQGYGVRIQDAGVYLLYSQVLFQDVTFTMGQVVSREGQGRQETLFRCIRSMPSHPDRAYNSCYSAGVFHLHQGDILSVIIPRARAKLNLSPHGTFLGFVKL

SEQ ID NO: 3543 - protein, 52 aa, Homo sapiens
MIVSCEFVSFPFFLSLPFPYISLGAHLWLLAFCFLLCFISSFQLPVSEGHCC

SEQ ID NO: 3544 - protein, 132 aa, Homo sapiens
MDTTSYDVSVLNSVRRGGAKPPRPALDARPSLYAQVQKPPRHAPGAHGGPGEMAAMIEVKKDEADHDGDGPPYDTLHIYGYEGSESIAESLSSLGTDSSDSDVDYDFLNDWGPRFKMLAELYGSDPREELLY

SEQ ID NO: 3545 - protein, 327 aa, Homo sapiens
MRALPGLLEARARTPRLLLLQCLLAAARPSSADGSAPDSPFTSPPLREEIMANNFSLESHNISLTEHSSMPVEKNITLERPSNVNLTCQFTTSGDLNAVNVTWKKDGEQLENNYLVSATGSTLYTQYRFTIINSKQMGSYSCFFREEKEQRGTFNFKVPELHGKNKPLISYVGDSTVLTCKCQNCFPLNWTWYSSNGSVKVPVGVQMNKYVINGTYANETKLKITQLLEEDGESYWCRALFQLGESEEHIELVVLSYLVPLKPFLVIVAEVILLVATILLCEKYTQKKKKHSDEGKEFEQIEQLKSDDSNGIENNVPRHRKNESLGQ

SEQ ID NO: 3546 - protein, 35 aa, Homo sapiens
PLPAVVCLPDQELPTLFPKVTGFSRAQIPNTGLLV

SEQ ID NO: 3547 - protein, 169 aa, Homo sapiens
  SITE (93): Xaa equals any amino acid
  SITE (109): Xaa equals any amino acid
  SITE (127): Xaa equals any amino acid
  SITE (140): Xaa equals any amino acid
  SITE (154): Xaa equals any amino acid
  SITE (160): Xaa equals any amino acid
MKTGLVLVVLGHVSFITAALFHGTVLRYVGTPQDAVALQYCVVNILSVTSAIVVITSGIAAIVLSRYLPSTPLRWTVFSSSVACALLSLTCAXGLLASIAMTFATQGKXLLAACTFGKLLNYWPSHXNCPFRPHTQFNRXPALWPSWGHSPLKXFLAGGXEKKRGVFAW

SEQ ID NO: 3548 - protein, 159 aa, Homo sapiens
MRVMAPRALLLLLSGGLALTETWACECGVGREAASAERSEGPARRGRRTRGAAQGGGSGGSQPLLAPRLPLHEVFRHRRVPARPRRAPLHLSGLRGRHAFVRFDSDAASPRGEPRAPWVEQEGPEYWDRETQNYKRQAQADRVSLRNLRGYYNQSEDGE

SEQ ID NO: 3549 - protein, 80 aa, Homo sapiens
  SITE (66): Xaa equals any amino acid
MERWVDDAFWSFLFSLILIVIMFLWRPSANNQRYAFMPLIDDSDDEIEEFMVTSENLTEGIKLRAXKISFQWEQLSLATC

SEQ ID NO: 3550 - protein, 216 aa, Homo sapiens
MLRLSERNMKVLLAAALIAGSVFFLLLPGPSAADEKKKGPKVTVKVYFDLRIGDEDVGRVIFGLFGKTVPKTVDNFVALATGEKGFGYKNSKFHRVIKDFMIQGGDFTRGDGTGGKSIYGERFPDENFKLKHYGPGWVSMANAGKDTNGSQFFITTVKTAWLDGKHVVFGKVLEGMEVVRKVESTKTDSRDKPLKDVIIADCGKIEVEKPFAIAKE

SEQ ID NO: 3551 - protein, 264 aa, Homo sapiens
MRTLWMALCALSRLWPGAQAGCAEAGRCCPGRDPACFARGWRLDRVYGTCFCDQACRLTGDCCFDYDRACPARPCFVGEWSPWSGCADQCKPTTRVRRRSVQQEPQNGGAPCPPLEERAGCLEYSTPQGQDCGHTYVPAFITTSAFNKERTRQATSPHWSTHTEDAGYCMEFKTESLTPHCALENRPLTRWMQYLREGYTVCVDCQPPAMNSVSLRCSGDGLDSDGNQTLHWQAIGNPRCQGTWKKVRRVDQCSCPAVHSFIFI

SEQ ID NO: 3552 - protein, 206 aa, Homo sapiens
  SITE (201): Xaa equals any amino acid
  SITE (202): Xaa equals any amino acid
MGGPALIIHAGASVLAGGAVDHTGPVLFLAVLSRVPGGTGAFIEAIVQAHAGPVVGTGGRGAGPNISITELPVPAVGANALPGFSTESVKAAGRGHALVTKGTLPARLAPANIVILAESILGVAGREAFSPIGAVAESQQEQEDAQEGFGRGHLWAAGVAVPGAVRARVRLLAPHWASGCGRERGRGRAARGKPGLHRAAXXALHR

SEQ ID NO: 3553 - protein, 80 aa, Homo sapiens
MSVNPTCLVLIILLFISIILTFKGYLISCVWNCYRYINGRNSSDVLVYVTSNDTTVLLPPYDDATVNGAAKEPPPPYVSA

SEQ ID NO: 3554 - protein, 411 aa, Homo sapiens
MEQRGQNAPAASGARKRHGPGPREARGARPGPRVPKTLVLVVAAVLLLVSAESALITQQDLAPQQRAAPQQKRSSPSEGLCPPGHHISEDGRDCISCKYGQDYSTHWNDLLFCLRCTRCDSGEVELSPCTTTRNTVCQCEEGTFREEDSPEMCRKCRTGCPRGMVKVGDCTPWSDIECVHKESGIIIGVTVAAVVLIVAVFVCKSLLWKKVLPYLKGICSGGGGDPERVDRSSQRPGAEDNVLNEIVSILQPTQVPEQEMEVQEPAEPTGVNMLSPGESEHLLEPAEAERSQRRRLLVPANEGDPTETLRQCFDDFADLVPFDSWEPLMRKLGLMDNEIKVAKAEAAGHRDTLYTMLIKWVNKTGRDASVHTLLDALETLGERLAKQKIEDHLLSSGKFMYLEGNADSAMS

SEQ ID NO: 3555 - protein, 32 aa, Homo sapiens
MFSSYFCFATHIQTVLILAVSLFWGTTLRKKS

SEQ ID NO: 3556 - protein, 164 aa, Homo sapiens
MEPLRLLILLFVTELSGAHNTTVFQGVAGQSLQVSCPYDSMKHWGRRKAWCRQLGEKGPCQRVVSTHNLWLLSFLRRWNGSTAITDDTLGGTLTITLRNLQPHDAGLYQCQSLHGSEADTLRKVLVEVLADPLDHRDAGDLWFPGESESFEDAHVEHSISRSSS

SEQ ID NO: 3557 - protein, 161 aa, Homo sapiens
  SITE (142): Xaa equals any amino acid
  SITE (151): Xaa equals any amino acid
  SITE (159): Xaa equals any amino acid
  SITE (160): Xaa equals any amino acid
MALSAETESHIYRALRTASGAAAHLVALGFTIFVAVLARPGSSLFSWHPVLMSLAFSFLMTEALLVFSPESSLLHSLSRKGRARCHWVLQLLALLCALLGLGLVILHKEQLGKAHLVTRHGQAGLLAVLWAGLQCSSGVGLXYPKAWLPPXWAPWAERXXS

SEQ ID NO: 3558 - protein, 192 aa, Homo sapiens
  SITE (167): Xaa equals any amino acid
  SITE (168): Xaa equals any amino acid
  SITE (170): Xaa equals any amino acid
  SITE (181): Xaa equals any amino acid
  SITE (187): Xaa equals any amino acid
  SITE (191): Xaa equals any amino acid
MGFNTGAWSGVLVAMVLFGQDLTAIALSAMVGGIVTSLLVWLLAWRNGIDTFRLIIIGIGVRAMVVAFNTWLLLKASLETALTAGLWNAGSLNGLTWAKTSRSAPIIILMLIAAALLVRRMRLLEMGDDTACALGVSVERSRLLMMLVAVVLTAAATALAGRISFMXXVXPHIARRISNTXLWGGRXPIFXR

SEQ ID NO: 3559 - protein, 39 aa, Homo sapiens
MSLTSSLTFLSHILLLPQKLQFLSWMERQQRCTGVAKYA

SEQ ID NO: 3560 - protein, 243 aa, Homo sapiens
MSSGTELLWPGAALLVLLGVAASLCVRCSRPGAKRSEKIYQQRSLREDQQSFTGSRTYSLVGQAWPGPLADMAPTRKDKLLQFYPSLEDPASSRYQNFSKGSRHGSEEAYIDPIAMEYYNWGRFSKPPEDDDANSYENVLICKQKTTETGAQQEGIGGLCRGDLSLSLALKTGPTSGLCPSASPEEDEESEDYQNSASIHQWRESRKVMGQLQREASPGPVGSPDEEDGEPDYVNGEVAATEA

SEQ ID NO: 3561 - protein, 222 aa, Homo sapiens
MKGRVLALCGLVCFQGLLGWYMVKSGLEEKSDSHDIPRVSQYRLAAHLGSALVLYCASLWTSLSLLLPPHKLPETHQLLQLRRFAHGTAGLVFLTALSGAFVAGLDAGLVYNSFPKMGESWIPEDLFTFSPILRNVFENPTMVQFDHRILGITSVTAITVLYFLSRRIPLPRRTKMAAVTLLALATLLMYVPTPLAATHQSGSLALLTGALWLMNELRRVPK

SEQ ID NO: 3562 - protein, 184 aa, Homo sapiens
MLGTGLWGGGLMVLTAAILISLMGWRYGCFSKSGLCRSVLTALLSGGLALLGALICFVTSGVALKDGPFCMFDVSSFNQTQAWKYGYPFKDLHRIICMTVRSGTPSAWSPLQLLSGTCPSSPPFCASACSSFSWWSFMSSTASWAFSAASARSDRQNLHLQAWVFSSSAVLNPFYKEWVQALCG

SEQ ID NO: 3563 - protein, 118 aa, Homo sapiens [sequence omitted]

SEQ ID NO: 3564 - protein, 361 aa, Homo sapiens
MGVPRPQPWALGLLLFLLPGSLGAESHLSLLYHLTAVSSPAPGTPAFWVSGWLGPQQYLSYNSLRGEAEPCGAWVWENQVSWYWEKETTDLRIKEKLFLEAFKALGGKGPYTLQGLLGCELGPDNTSVPTAKFALNGEEFMNFDLKQGTWGGDWPEALAISQRWQQQDKAANKELTFLLFSCPHRLREHLERGRGNLEWKEPPSMRLKARPSSPGFSVLTCSAFSFYPPELQLRFLRNGLAAGTGQGDFGPNSDGSFHASSSLTVKSGDEHHYCCIVQHAGLAQPLRVELGEVPPGGDAPGFPLPCLTAAPVLPESDLPPHCCHLLESDCLEPHACQCPQNLMACPSQGQLPSVSCCFWPH

SEQ ID NO: 3565 - protein, 340 aa, Homo sapiens
MIPLLLAALLCVPAGALTCYGDSGQPVDWFVVYKLPALRGSGEAAQRGLQYKYLDESSGGWRDGRALINSPEGAVGRSLQPLYRSNTSQLAFLLYNDQPPQPSKAQDSSMRGHTKGVLLLDHDGGFWLVHSVPNFPPPASSAAYSWPHSACTYGQTLLCVSFPFAQFSKMGKQLTYTYPWVYNYQLEGIFAQEFPDLENVVKGHHVSQEPWNSSITLTSQAGAVFQSFAKFSKFGDDLYSGWLAAALGTNLQVQFWHKTVGILPSNCSDIWQVLNVNQIAFPGPAGPSFNSTEDHSKWCVSPKGPWTCVGDMNRNQGEEQRGGGTLCAQLQPSGKPSSRW

SEQ ID NO: 3566 - protein, 274 aa, Homo sapiens
DMAGDWHWALRVTPGLGVVAVLLLFLVVREPPRGAVERHSDLPPLNPTSWWADLRALARNPSFVLSSLGFTAVAFVTGSLALWAPAFLLRSRVVLGETPPCLPGDSCSSSDSLIFGLITCLTGVLGVGLGVEISRRLRHSNPRADPLVCATGLLGSAPFLFLSLACARGSIVATYIFIFIGETLLSMNWAIVADILLYVVIPTRRSTAEAFQIVLSHLLGDAGSPYLIGLISDRLRRNWPPSFLSEFRALQFSLMLCAFVGALGGALPGHRHLH

SEQ ID NO: 3567 - protein, 130 aa, Homo sapiens
  SITE (87): Xaa equals any amino acid
MTVENIDLKTIGFFSLVGQAYVFKFLWSPLMDRYTPPFFGRRRGWLLATQILLLVAIAAMGFLEPGTQLRWMAALAVVIAFCSASQXYSLRCVENRCASGRRTWCGRGNQRAGLPFRDAGFRRPSPVAGR

SEQ ID NO: 3568 - protein, 313 aa, Homo sapiens
MSDLLLLGLIGGLTLLLLLTLLAFAGYSGLLAGVEVSAGSPPIRNVTVAYKFHMGLYGETGRLFTESCSISPKLRSIAVYYDNPHMVPPDKCRCAVGSILSEGEESPSPELIDLYQKFGFKVFSFPAPSHVVTATFPYTTILSIWLATRRVHPALDTYIKERKLCAYPRLEIYQEDQIHFMCPLARQGDFYVPEMKETEWKWRGLVEAIDTQVDGTGADTMSDTSSVSLEVSPGSRETSAATLSPGASSRGWDDGDTRSEHSYSESGASGSSFEELDLEGEGPLGESRLDPGTEPLGTTKWLWEPTAPEKGKE

SEQ ID NO: 3569 - protein, 150 aa, Homo sapiens
MKPINKCIGRNMTYFSGLLVILAFAAWVALAEGLGVAVYAAAVLLGAGCATILVTSLAMTADLIGPHTNSGAFVYGSMSFLDKVANGLAVMAIQSLHPCPSELCCRACVSFYHWAMVAVTGGVGVAAALCLCSLLLWPTRLRRWDRDARP

SEQ ID NO: 3570 - protein, 160 aa, Homo sapiens
MLFWVLGLLILCGFLWTRKGKLKIEDITDKYIFITGCDSGFGNLAARTFDKKGFHVIAACLTESGSTALKAETSERLRTVLLDVTDPENVKRTAQWVKNQVGEKGLWGLINNAGVPGVLAPTDWLTLEDYREPIEVNLFGLHQCDTKYASFGQESSRESY

SEQ ID NO: 3571 - protein, 82 aa, Homo sapiens
IPLKNDSGQKIPNESRCLPVFHHLRHGESHLHKNRDDGYEYIARLPNLYRQTFGTNYVLTYLSLRLSTPGVISLREYYRLST

SEQ ID NO: 3572 - protein, 164 aa, Homo sapiens; identical to SEQ ID NO: 3556

SEQ ID NO: 3573 - protein, 254 aa, Homo sapiens
MRPAALRGALLGCLCLALLCLGGADKRLRDNHEWKKLIMVQHWPETVCEKIQNDCRDPPDYWTIHGLWPDKSEGCNRSWPFNLEEIKDLLPEMRAYWPDVIHSFPNRSRFWKHEWEKHGTCAAQVDALNSQKKYFGRSLELYRELDLNSVLLKLGIKPSINYYQVADFKDAARVYGVIPKIQCLPPSQDEEVQTIGQIELCLTKQDQQLQNCTEPGEQLPQAGIWLANGPAESRVLRVCEDGPVFYPPLKKTKH

SEQ ID NO: 3574 - protein, 92 aa, Homo sapiens
MGSTWGSPGWVRLALCLTGLVLSLYALHVKAARARDRDYRALCDVGTAISCSRVFSSRLPADTLGLCPDAAELPGVSRWFCLPGLDPVLRAL

SEQ ID NO: 3575 - protein, 58 aa, Homo sapiens [sequence omitted]

SEQ ID NO: 3576 - protein, 584 aa, Homo sapiens
MDILLLLLFFMIIFAILGFYLFSPNPSDPYFSTLENSIVSLFVLLTTANFPDVMMPSYSRNPWSCVFFIVYLSIELYFIMNLLLAVVFDTFNDIEKRKFKSLLLHKRTAIQHAYRLLISQRRPAGISYRQFEGLMRFYKPRMSARERYLTFKALNQNNTPLLSLKDFYDIYEVAALKWKAKKNREHWFDELPRTALLIFKGINILVKSKAFQYFMYLVVAVNGVWILVETFMLKGGNFFSKHVPWSYLVFLTIYGVELFLKVAGLGPVEYLSSGWNLFDFSVTVFAFLGLLALALNMEPFYFIVVLRPLQLLRLFKLKERYRNVLDTMFELLPRMASLGLTLLIFYYSFAIVGMEFFCGIVFPNCCNTSTVADAYRWRNHTVGNRTVVEEGYYYLNNFDNILNSFVTLFELTVVNNWYIIMEGVTSQTSHWSRLYFMTFYIVTMVVMTIIVAFILEAFVFRMNYSRKNQDSEVDGGITLEKEISKEELVAVLELYREARGASSDVTRLLETLSQMERYQQHSMVFLGRRSRTKSDLSLKMYQEEIQEWYEEHAREQEQQRQLSSSAAPAAQQPPGSRQRSQTVT

SEQ ID NO: 3577 - protein, 69 aa, Homo sapiens [sequence omitted]

SEQ ID NO: 3578 - protein, 180 aa, Homo sapiens [sequence omitted]

SEQ ID NO: 3579 - protein, 170 aa, Homo sapiens; identical to SEQ ID NO: 3247

SEQ ID NO: 3580 - protein, 53 aa, Homo sapiens
MPYQMLLNKTIFIDFIVVSLSRCCAFLLAINICVLVIETKQQASVSFSHVKKL

SEQ ID NO: 3581 - protein, 238 aa, Homo sapiens
MARACLQAVKYLMFAFNLLFWLGGCGVLGVGIWLAATQGSFATLSSSFPSLSAANLLIITGAFVMAIGFVGCLGAIKENKCLLLTFFLLLLLVFLLEATIAILFFAYTDKIDRYAQQDLKKGLHLYGTQGNVGLTNAWSIIQTDFRCCGVSNYTDWFEVYNATRVPDSCCLEFSESCGLHAPGTWWKAPCYETVKVWLQENLLAVGIFGLCTALVQILGLTFAMTMYCQVVKADTYCA

SEQ ID NO: 3582 - protein, 20 aa, Homo sapiens
MWVSFGGSLFSLSQLLLYYY

SEQ ID NO: 3583 - protein, 211 aa, Homo sapiens
MNKTIIGVSVLSVLVVSVVAVLVYKFYFHLMLLAGCIKYGRGENIYDAFVIYSSQDEDWVRNELVKNLEEGVPPFQLCLHYRDFIPGVAIAANIIHEGFHKSRKVIVVVSQHFIQSRWCIFEYEIAQTWQFLSSRAGIIFIVLQKVEKTLLRQQVELYRLLSRNTYLEWEDSVLGRHIFWRRLRKALLDGKSWNPEGTVGTGCNWQEATSI

SEQ ID NO: 3584 - protein, 20 aa, Homo sapiens
MLLSVAIFILLTLVYAYWTM

SEQ ID NO: 3585 - protein, 77 aa, Homo sapiens [sequence omitted]

SEQ ID NO: 3586 - protein, 180 aa, Homo sapiens; identical to SEQ ID NO: 3487

SEQ ID NO: 3587 - protein, 92 aa, Homo sapiens; identical to SEQ ID NO: 3574

SEQ ID NO: 3588 - protein, 25 aa, Homo sapiens
MTLMIPLLLLTPITATSTSSGPRSD

SEQ ID NO: 3589 - protein, 285 aa, Homo sapiens
MLMLMLLMMFAVHCTWVTSNAYSSPSVVLASYNHDGTRNILDDFREAYFWLRQNTDEHARVMSWWDYGYQIAGMANRTTLVDNNTWNNSHIALVGKAMSSNETAAYKIMRTLDVDYVLVIFGGVIGYSGDDINKFLWMVRILKETSQNIREIDYFTPQGEFRVDKAGSPTLLNCLMYKMSYYRFGEMQLDFRTPPGFDRTRNAEIGNKDIKFKHLEEAFTSEHWLVRIYKVKAPDNRETLDHKPRVTNIFPKQKYLSKKTTKRKRGYIKNKLVFKKGKKISKKTV

SEQ ID NO: 3590 - protein, 32 aa, Homo sapiens
MKIHTLIQLILLQMLLEAPVVTLLPIIFFMME

SEQ ID NO: 3591 - protein, 349 aa, Homo sapiens
METHEVPSSTYVPKGMNSTESNSSASVRPKVLSSIQEGTVPDNTSSARGKEDVNKTLPNLQVVNHQQGPHHRHILKLLPSMEATGGEKSSTPIKGPKRGHPRQNLHKHFDINEHLPWMIVLFLLLVLVVIVVCSIRKSSRTLKKGPRQDPSAIVEKAGLKKSMTPTQNREKWIYYCNGHGIDILKLVAAQVGSQWKDIYQFLCNASEREVAAFSNGYTADHERAYAALQHWTIRGPEASLAQLISALRQHRRNDVVEKIRGLMEDTTQLETDKLALPMSPSPLSPSPIPSPNAKLENSALLTVEPSPQDKNKGFFVDESEPLLRCDSTSSGSSALSRNGSFITKKKKKK

SEQ ID NO: 3592 - protein, 90 aa, Homo sapiens
MGAPWCWLPTVWATCTRSTFCSGSRRLEGQVYPGLRVTGCALGGRGQDPARPGFRRQQPDPSHRAPEDPGAAAVSCLHQLAAALQLHMVT

SEQ ID NO: 3593 - protein, 41 aa, Homo sapiens
MKWIFTVLILTSCFFTAGICEDGICSRIQLRDKIVQSAFRQ

SEQ ID NO: 3594 - protein, 13 aa, Homo sapiens
LGAIPILPPFSTE

SEQ ID NO: 3595 - protein, 74 aa, Homo sapiens [sequence omitted]

SEQ ID NO: 3596 - protein, 41 aa, Homo sapiens [sequence omitted]

SEQ ID NO: 3597 - protein, 11 aa, Homo sapiens
LTAAAGAAAAA

SEQ ID NO: 3598 - protein, 276 aa, Homo sapiens
  SITE (260): Xaa equals any amino acid
MFFLWTALFWGGVMFYLLLKRSGREITWKDFVNNYLSKGVVDRLEVVNKRFVRVTFTPGKTPVDGQYVWFNIGSVDTFERNLETLQQELGIEGENRVPVVYIAESDGSFLLSMLPTVLIIAFLLYTIRRGPAGIGRTGRGMGGLFSVGETTAKVLKDEIDVKFKDVAGCEEAKLEIMEFVNFLKNPKQYQDLGAKIPKGAILTGPPGTGKTLLAKATAGEANVPFITVSGSEFLGMVLIQQQMSSFWPAPIDQISWTPRXLGRGVSTGRSLLDHQT

SEQ ID NO: 3599 - protein, 247 aa, Homo sapiens
MTPALTALLCLGLSLGPRTRVQAGPFPKPTLWAEPGSVISWGSPVTIWCQGSLEAQEYQLDKEGSPEPLDRNNPLEPKNKARFSIPSMTQHHAGRYRCHYYSSAGWSEPSDPLELVMTGAYSKPTLSALPSPVVASGGNMTLRCGSQKRYHHFVLMKEGEHQLPRTLDSQQLHSGGFQALFPVGPVNPSHRWRFTCYYYYMNTPRVWSHPSDPLEILPSGVSRKPSLLTLQGPVLAPGQSLTLQVWL

SEQ ID NO: 3600 - protein, 92 aa, Homo sapiens
  SITE (70): Xaa equals any amino acid
MQVSTAALAVLLCTMALCNQFSASLAADTPTACCFSYTSRQIPQNFIADYFETSSQCSKPGVIFLTKRSXQVCADPSEEWVQKYVSDLELSA

SEQ ID NO: 3601 - protein, 293 aa, Homo sapiens
  SITE (286): Xaa equals any amino acid
  SITE (290): Xaa equals any amino acid
MDPKGLLSLTFVLFLSLAFGASYGTGGRMMNCPKILRQLGSKVLLPLTYERINKSMNKSIHIVVTMAKSLENSVENKIVSLDPSEAGPPRYLGDRYKFYLENLTLGIRESRKEDEGWYLMTLEKNVSVQRFCLQLRLYEQVSTPEIKVLNKTQENGTCTLILGCTVEKGDHVAYSWSEKAGTHPLNPANSSHLLSLTLGPQHADNIYICTVSNPISNNSQTFSPWPGCRTDPSETKPWAVYAGLLGGVIMILIMVVILQLRRRGKTNHYQTTVEKKKPYDLCPSPXTRSXKNK

SEQ ID NO: 3602 - protein, 99 aa, Homo sapiens
MKVSAALLCLLLMAATFSPQGLAQPDSVSIPITCCFNVINRKIPIQRLESYTRITNIQCPKEAVIFKTKRCKEVCADPKERWVRDSMKHLDQIFQNLKP

SEQ ID NO: 3603 - protein, 177 aa, Homo sapiens [sequence omitted]

SEQ ID NO: 3604 - protein, 103 aa, Homo sapiens
  SITE (65): Xaa equals any amino acid
  SITE (90): Xaa equals any amino acid
  SITE (91): Xaa equals any amino acid
  SITE (96): Xaa equals any amino acid
MNFQQRLQSLWTLASTLLPSFAGDSLSNADGCAPLPGFYPASLEPGIRGPGPRIPLWALPSEGVXPQKLWEAFWAVKDTMQAQDNITSAXXAAAGXSAERLGC

SEQ ID NO: 3605 - protein, 551 aa, Homo sapiens
  SITE (309): Xaa equals any amino acid
  SITE (388): Xaa equals any amino acid
MLPLLLLPLLWGGSLQEKPVYELQVQKSVTVQEGLCVLVPCSFSYPWRSWYSSPPLYVYWFRDGEIPYYAEVVATNNPDRRVKPETQGRFRLLGDVQKKNCSLSIGDARMEDTGSYFFRVERGRDVKYSYQQNKLNLEVTALIEKPDIHFLEPLESGRPTRLSCSLPGSCEAGPPLTFSWTGNALSPLDPETTRSSELTLTPRPEDHGTNLTCQMKRQGAQVTTERTVQLNVSYAPQTITIFRNGIALEILQNTSYLPVLEGQALRLLCDAPSNPPAHLSWFQGSPALNATPISNTGILELRRVRSAEXGGFTCRAQHPLGFLQIFLNLSVYSLPQLLGPSCSWEAEGLHCRCSFRAWPAPSLCWRLEEKPLEGNSSQGSFKVNSSSXGPWANSSLILHGGLNSDLKVSCKAWNIYGSQSGSVLLLQGRSNLGTGVVPAALGGAGVMALLCICLCLIFFLIVKARRKQAAGRPEKMDDEDPIMGTITSGSRKKPWPDSPGDQASPPGDAPPLEEQKELHYASLSFSEMKSREPKDQEAPSTTEYSEIKTSK

SEQ ID NO: 3606 - protein, 178 aa, Homo sapiens
  SITE (175): Xaa equals any amino acid
MHSSALLCCLVLLTGVRASPGQGTQSENSCTHFPGNLPNMLRDLRDAFSRVKTFFQMKDQLDNLLLKESLLEDFKGYLGCQALSEMIQFYLEEVMPQAENQDPDIKAHVNSLGENLKTLRLRLRRCHRFLPCENKSKAVEQVKNAFNKLQEKGIYKAMSEFDIFINYIEAYMTMXIRN

SEQ ID NO: 3607 - protein, 76 aa, Homo sapiens
MKVSAALLCLLLMAATFSPQGLAQPDSVSIPITCCFNVINRKIPIQRLESYTRITNIQCPKEAVIFKTKRGQGGLC

SEQ ID NO: 3608 - protein, 5 aa, Homo sapiens
LPCMS

SEQ ID NO: 3609 - protein, 34 aa, Homo sapiens
MSFPCAHIAFGSYVSLFSLLEYSQPLVFPTMLTF

SEQ ID NO: 3610 - protein, 105 aa, Homo sapiens
FTPVIPALWEAEPGGSLEPRSLRPAWVTWQNPVSTKISQKGIDRPKSQSLAWPNHLRMVSTQDSFTQLHPTLCLLPQTERESATLPQPASSQGQESFTLSPSHSS

SEQ ID NO: 3611 - protein, 40 aa, Homo sapiens
MPSLRGSSQPPALEHVPVHLFVMLVFILLSSCCHFQTVSG

SEQ ID NO: 3612 - protein, 263 aa, Homo sapiens
MLLAWVQAFLVSNMLLAEAYGSGGCFWDNGHLYREDQTSPAPGLRCLNWLDAQSGLASAPVSGAGNHSYCRNPDEDPRGPWCYVSGEAGVPEKRPCEDLRCPETTSQALPAFTTEIQEASEGPGADEVQVFAPANALPARSEAAAVQPVIGISQRVRMNSKEKKDLGTLGYVLGITMMVIIIAIGAGIILGYSYKRGKDLKEQHDQKVCEREMQRITLPLSAFTNPTCEIVDEKTVVVHTSQTPVDPQEGSTPLMGQAGTPGA

SEQ ID NO: 3613 - protein, 81 aa, Homo sapiens
MGFFLVLVMEQITLAYKEQSGPSPLEETRALLGTVNGGPQHWHDWARGPTGEWSPSNPLSLACPVYWCSPWPSTPCSRGWR

SEQ ID NO: 3614 - protein, 57 aa, Homo sapiens
MEAILLNLNLFLYLFPSYDGQYIFPSSIKCPPRSLILPSSALICTVRLPPSFFFFFF

SEQ ID NO: 3615 - protein, 324 aa, Homo sapiens
  SITE (283): Xaa equals any amino acid
MNCQQLWLGFLLPMTVSGRVLGLAEVAPVDYLSQYGYLQKPLEGSNNFKPEDITEALRAFQEASELPVSGQLDDATRARMRQPRCGLEDPFNQKTLKYLLLGRWRKKHLTFRILNLPSTLPPHTARAALRQAFQDWSNVAPLTFQEVQAGAADIRLSFHGRQSSYCSNTFDGPGRVLAHADIPELGSVHFDEDEFWTEGTYRGVNLRIIAAHEVGHALGLGHSRYSQALMAPVYEGYRPHFKLHPDDVAGIQALYGKKSPVIRDEEEEETELPTVPPVPTEPXPMPDPCSSELDAMMLGEAPPLQAVGRRWGQPADPEAWTNGK

SEQ ID NO: 3616 - protein, 60 aa, Homo sapiens [sequence omitted]

SEQ ID NO: 3617 - protein, 337 aa, Homo sapiens
YLVVLLISIPIGFLFKKAGPGLKRWGAAAVGLGLTLFTCGPHTLHSLVTILGTWALIQAQPCSCHALALAWTFSYLLFFRALSLLGLPTPTPFTNAVQLLLTLKLVSLASEVQDLHLAQRKEMASGFSKGPTLGLLPDVPSLMETLSYSYCYVGIMTGPFFRYRTYLDWLEQPFPGAVPSLRPLLRRAWPAPLFGLLFLLSSHLFPLEAVREDAFYARPLPARLFYMIPVFFAFRMRFYVAWIAAECGCIAAGFGAYPVAAKARAGGGPTLQCPPPSSPEKAASLEYDYETIRNIDCYSTDFCVRVRDGMRYWNMTVQWWLAQYIYKSAPARSYVLR

SEQ ID NO: 3618 - protein, 50 aa, Homo sapiens
MNYYTVLFGVSRALGVLAQLIWSRALGFPLERPKSMSTEGLMKFVDSKSG

SEQ ID NO: 3619 - protein, 81 aa, Homo sapiens
MCVHTCVCMCVHTCVCVHACVWAHVCMCVCECVCWGGGMALGKVCPGWKPHSLPSAWRWACAWRPIARRLRPTGATSTVPL

SEQ ID NO: 3620 - protein, 84 aa, Homo sapiens
MHIFLLKSPILSPCLVLFALELLFLQRGFSTLKEKEDHDEEGSTLKFLQPFSAYCWTPARILEYLFRAAYLGFRMPLFLPLISC

SEQ ID NO: 3621 - protein, 345 aa, Homo sapiens
GTSRADLPRPEVAPLRGLPRPKFSAPRGLRAPRSPRPEVSARTMRLGSPGLLFLLFSSLRADTQEKEVRAMVGSDVELSCACPEGSRFDLNDVYVYWQTSESKTVVTYHIPQNSSLENVDSRYRNRALMSPAGMLRGDFSLRLFNVTPQDEQKFHCLVLSQSLGFQEVLSIEVTLHVAANFSVPVVSAPHSPSQDELTFTCTSINGYPRPNVYWINKTDNSLLDQALQNDTVFLNMRGLYDVVSVLRIARTPSVNIGCCIENVLLQQNLTVGSQTGNDIGERDKITENPVSTGEKNAATWSILAVLCLLVVVAVAIGWVCRDRCLQHSYAGAWAVSPETELTGHV

SEQ ID NO: 3622 - protein, 135 aa, Homo sapiens
  SITE (124): Xaa equals any amino acid
  SITE (134): Xaa equals any amino acid
MGAAAWARPLSVSFLLLLLPLPGMPAGSWDPAGYLLYCPCMGRFGNQADHFLGSLAFAKLLNRTLAVPPWIEYQHHKPPFTNLHVSYQKYFKLEPLQAYHRVISLEDFMEKLAPTHWPPEKRVXYCFEVAASEXR

SEQ ID NO: 3623 - protein, 37 aa, Homo sapiens
MGSGWSYLWWSKSFQRVGASPLTSLCLWLWGTWVCWW

SEQ ID NO: 3624 - protein, 55 aa, Homo sapiens
MFSISHVWVKFVTVINVTILWAHCLSSGVRDQPGQHGEPPSLQKIEKLVHGGSRL

SEQ ID NO: 3625 - protein, 69 aa, Homo sapiens [sequence omitted]

SEQ ID NO: 3626 - protein, 76 aa, Homo sapiens
MMKTQLLFTVLYVFVLAERFLISTMINSDHFPTSTTSSKGKVILYTLRISSLNLLLMLLRSFSGGKSNISGGYYFK

SEQ ID NO: 3627 - protein, 179 aa, Homo sapiens
  SITE (137): Xaa equals any amino acid
  SITE (171): Xaa equals any amino acid
MSGGRAPAVLLGGVASLLLSFVWMPALLPVASRLLLLPRVLLTMASGSPPTQPSPASDSGSGYVPGSVSAAFVTCPNEKVAKEIARAVVEKRLAACVNLIPQITSIYEWKGKIEEDSEVLMMIKTQSSLVPALTDFXRSVHPYEVAEVIALPVEQGNFPYLQWVRQVTESXSDSITVLP

SEQ ID NO: 3628 - protein, 49 aa, Homo sapiens
MYQQWDHRKRTYCFQTPYLSSRASWIIPIRSKFPIEVTHTQYLFIFIFL

SEQ ID NO: 3629 - protein, 137 aa, Homo sapiens
  SITE (51): Xaa equals any amino acid
MANLAFCIWIVASSLILLSSLLLGDIILSFAKFLIKGALVPCSWKLIQSPXTNKKHSESLVPEAERMEPSLCLITALNRKQLIFFLLSNITTGLINLMVDTLHSSTLWALFVVNLYMFSNCLIVYVLYLQDKTVQFW

SEQ ID NO: 3630 - protein, 227 aa, Homo sapiens [sequence omitted]

SEQ ID NO: 3631 - protein, 382 aa, Homo sapiens
MTEFWLISAPGEKTCQQTWEKLHAATSKNNNLAVTSKFNIPDLKVGTLDVLVGLSDELAKLDAFVEGVVKKVAQYMADVLEDSKDKVQENLLANGVDLVTYITRFQWDMAKYPIKQSLKNISEIIAKGVTQIDNDLKSRASAYNNLKGNLQNLERKNAGSLLTRSLAEIVKKDDFVLDSEYLVTLLVVVPKLNHNDWIKQYETLAEMVVPRSSNVLSEDQDSYLCNVTLFRKAVDDFRHKARENKFIVRDFQYNEEEMKADKEEMNRLSTDKKKQFGPLVRWLKVNFSEAFIAWIHVKALRVFVESVLRYGLPVNFQAMLLQPNKKTLKKLREVLHELYKHLDSSAAAIIDAPMDIPGLNLSQQEYYPYVYYKIDCNLLEFK

SEQ ID NO: 3632 - protein, 285 aa, Homo sapiens
MDDSTEREQSRLTSCLKKREEMKLKECVSILPRKESPSVRSSKDGKLLAATLLLALLSCCLTVVSFYQVAALQGDLASLRAELQGHHAEKLPAGAGAPKAGLEEAPAVTAGLKIFEPPAPGEGNSSQNSRNKRAVQGPEETVTQDCLQLIADSETPTIQKGSYTFVPWLLSFKRGSALEEKENKILVKETGYFFIYGQVLYTDKTYAMGHLIQRKKVHVFGDELSLVTLFRCIQNMPETLPNNSCYSAGIAKLEEGDELQLAIPRENAQISLDGDVTFFGALKLL

SEQ ID NO: 3633 - protein, 28 aa, Homo sapiens
MYLLYSFDLWVPFPILFLLFLQVIFERN

SEQ ID NO: 3634 - protein, 112 aa, Homo sapiens
MQQPFNYPYPQIYWVDSSASSPWAPPGTVLPCPTSVPRRPGQRRPPPPPPPPPLPPPPPPPPLPPLPLPPLKKRGNHSTGLCLLVMFFMVLVALVGLGLGMFQLFHLQKELA

SEQ ID NO: 3635 - protein, 331 aa, Homo sapiens
ALRHSRELPGLAGVGYPYHRNAGTIASSRPLLSAEPLWSCDSENQNFLCLLLAALTFLLCKAIQNTSTSLHLQLSLCLFLAHLLFLVGIDRTEPKVLCSIIAGALHYLYLAAFTWMLLEGVHLFLTARNLTVVNYSSINRLMKWIMFPVGYGVPAVTVAISAASWPHLYGTADRCWLHLDQGFMWSFLGPVCAIFSANLVLFILVFWILKRKLSSLNSEVSTIQNTRMLAFKATAQLFILGCTWCLGLLQVGPAAQVMAYLFTIINSLQGFFIFLVYCLLSQQVQKQYQKWFREIVKSKSESETYTLSSKMGPDSKPSEGDVFPGQVKRKY

SEQ ID NO: 3636 - protein, 40 aa, Homo sapiens
MSENMWCLVFCSCVSLLRVMVSSFIHVPTKDMNSPFFMAT

SEQ ID NO: 3637 - protein, 154 aa, Homo sapiens
MGRDLRPGSRVLLLLLLLLLVYLTQPGNGNEGSVTGSCYCGKRISSDSPPSVQFMNRLRKHLRAYHRCLYYTRFQLLSWSVCGGNKDPWVQELMSCLDLKECGHAYSGIVAHQKHLLLPAPQLLRPQRGHLQISTPLPRCSCPPCSPLSAPPSQ

SEQ ID NO: 3638 - protein, 143 aa, Homo sapiens
MQAFRIWDVNQKTFYLRNNQLVAGYLQGPNVNLEEKIDVVPIEPHALFLGIHGGKMCLSCVKSGDETRLQLEAVNITDLSENRKQDKRFAFIRSDSGPTTSFESAACPGWFLCTAMEADQPVSLTNMPDEGVMVTKFYFQEDE

SEQ ID NO: 3639 - protein, 356 aa, Homo sapiens
  SITE (345): Xaa equals any amino acid
  SITE (349): Xaa equals any amino acid
  SITE (356): Xaa equals any amino acid
AQLQSQRPESMELSGATMARGLAVLLVLFLHIKNLPAQAADTCPEVKVVGLEGSDKLTILRGCPGLPGAPGPKGEAGVIGERGERGLPGAPGKAGPVGPKGDRGEKGMRGEKGDAGQSQSCATGPRNCKDLLDRGYFLSGWHTIYLPDCRPLTVLCDMDTDGGGWTVFQRRMDGSVDFYRDWAAYKQGFGSQLGEFWLGNDNIHALTAQGSSELRVDLVDFEGNHQFAKYKSFKVADEAEKYKLVLGAFVGGSAGNSLTGHNNNFFSTKDQDNDVSSSNCAEKFQGAWWYADCHASNLNGLYLMGPHESYANGINWSAAKGYKYSYKVSEMKVRPPRRARTPPQXPIRXIVSRLTX

SEQ ID NO: 3640 - protein, 142 aa, Homo sapiens
MRKTRLWGLLWMLFVSELRAATKLTEEKYELKEGQTLDVKCDYTLEKFASSQKAWQIIRDGEMPKTLACTERPSKNSHPVQVGRIILEDYHDHGLLRVRMVNLQVENSGLYQCVIYQPPKTSHAVRSHPLGGDQGFQGPLLQ

SEQ ID NO: 3641 - protein, 27 aa, Homo sapiens
TAQACLFPFLHGKDCRDCQSPCPRAPG

SEQ ID NO: 3642 - protein, 249 aa, Homo sapiens
  SITE (236): Xaa equals any amino acid
  SITE (240): Xaa equals any amino acid
  SITE (241): Xaa equals any amino acid
MSSGTELLWPGAALLVLLGVAASLCVRCSRPGAKRSEKIYQQRSLREDQQSFTGSRTYSLVGQAWPGPLADMAPTRKDKLLQFYPSLEDPASSRYQNFSKGSRHGSEEAYIDPIAMEYYNWGRFSKPPEDDDANSYENVLICKQKTTETGAQQEGIGGLCRGDLSLSLALKTGPTSGLCPSASPEEDEESEDYQNSASIHQWRESRKVMGQLQREASPGPVGSPDEEDGEPGGKTXGFYXXENWGEKVG

SEQ ID NO: 3643 - protein, 335 aa, Homo sapiens
MGHPPLLPLLLLLHTCVPASWGLRCMQCKTNGDCRVEECALGQDLCRTTIVRLWEEGEELELVEKSCTHSEKTNRTLSYRTGLKITSLTEVVCGLDLCNQGNSGRAVTYSRSRYLECISCGSSDMSCERGRHQSLQCRSPEEQCLDVVTHWIQEGEEGRPKDDRHLRGCGYLPGCPGSNGFHNNDTFHFLKCCNTTKCNEGPILELENLPQNGRQCYSCKGNSTHGCSSEETFLIDCRGPMNQCLVATGTHEPKNQSYMVRGCATASMCQHAHLGDAFSMNHIDVSCCTKSGCNHPDLDVQYRSGAAPQPGPAHLSLTITLLMTARLWGGTLLWT

SEQ ID NO: 3644 - protein, 36 aa, Homo sapiens
MAVAPVRVAGCWGKCHRVLLCVHVLVAVPRSCIVNP

SEQ ID NO: 3645 - protein, 273 aa, Homo sapiens
TFGRWGGDRADRITRPAGPGKGQRLTASVSWLNRCWHTGLALTKWEQGLKGERRGEGQKSEAMSPQVQGDCSCWRLHLLLEPVEVLGRAPQPGLQLLQQPEVVHLLEEVTVGRARSPSGFSPRQRLGQWVAQSCHDARNAAQQALEAGAEVGQAAAQLSSGSLTVEATQVTQKVAVGLVVLGQPQFVIEASPHLQVNSGPGQSLCPQAGRVEVWLVERGAQVVQIGPSQAAELVLQVAGEVIGFLDGGARPWVPCAIESWHCREVPEHRAQAR

SEQ ID NO: 3646 - protein, 303 aa, Homo sapiens
MGRPLLLPLLPLLLPPAFLQPSGSTGSGPSYLYGVTQPKHLSASMGGSVEIPFSFYYPWELATAPDVRISWRRGHFHGQSFYSTRPPSIHKDYVNRLFLNWTEGQKSGFLRISNLQKQDQSVYFCRVELDTRSSGRQQWQSIEGTKLSITQAVTTTTQRPSSMTTTWRLSSTTTTTGLRVTQGKRRSDSWHISLETAVGVAVAVTVLGIMILGLICLLRWRRRKGQQRTKATTPAREPFQNTEEPYENIRNEGQNTDPKLNPKDDGIVYASLALSSSTSPRAPPSHRPLKSPQNETLYSVLKA

SEQ ID NO: 3647 - protein, 46 aa, Homo sapiens
MLSFEEQMFLIFVMFSLPIFSFVVVCTFGAICKKPKVMKMYTYVCF

SEQ ID NO: 3648 - protein, 34 aa, Homo sapiens
MFPYIYSKNLHVVEPMEFIYMVLVTGLLYFLEVC

SEQ ID NO: 3649 - protein, 45 aa, Homo sapiens
  SITE (6): Xaa equals any amino acid
  SITE (17): Xaa equals any amino acid
  SITE (19): Xaa equals any amino acid
  SITE (20): Xaa equals any amino acid
MVSPWXSPLFLFAVVLXSXXGFPEPLGFYKRGRPLLFQRRREAEG

SEQ ID NO: 3650 - protein, 25 aa, Homo sapiens
MVLVFMLWFIVCTSFYCRPFPPFFC

SEQ ID NO: 3651 - protein, 29 aa, Homo sapiens
  SITE (19): Xaa equals any amino acid
  SITE (26): Xaa equals any amino acid
MSFEAQKWGFVLVVFFFFXVFFFFSXKRA

SEQ ID NO: 3652 - protein, 79 aa, Homo sapiens
MDRGADREAHLKLQVGLLLPLLFSLLAPALLAQLGGPVLPQLTCHGLQLGLVGPHLLLLAARGRHGHGHSALYSASADF

SEQ ID NO: 3653 - protein, 71 aa, Homo sapiens
AGSIWRTWKFFYFLCPSRSFLHLWRSLSVLFFCLQSSEGNSSALEVLEYLGGIFSAFLSCSAFVEQLLCIS

SEQ ID NO: 3654 - protein, 5 aa, Homo sapiens
DLIIC

SEQ ID NO: 3655 - protein, 56 aa, Homo sapiens
MPTACLGRNWLPALLCCASLFPSMHGLVCPCVLFFRSHLGGPESPHLPMQSPVAIV

SEQ ID NO: 3656 - protein, 66 aa, Homo sapiens [sequence omitted]

SEQ ID NO: 3657 - protein, 86 aa, Homo sapiens
MSGFLSLFFLFFFLRWSLTLSPRLECSGAISAHCKLRLPGSRHSPASASRVAGTTGARYHTRLIFVFLVETGFHHVSQDGLDLLTS

SEQ ID NO: 3658 - protein, 39 aa, Homo sapiens
LTCLKILPYWVPMLPHQNPIYLSTSSSAHLTRKPHLTTF

SEQ ID NO: 3659 - protein, 32 aa, Homo sapiens
MALSLLIFVGLKSVLSETWIATPAIFCFPVAW

SEQ ID NO: 3660 - protein, 66 aa, Homo sapiens
KFFSLRMLNIGPHSLLACRVSAERSAVSLMGFPLRVTQPFSLAALNIFSFISTLVNLTIMCLGVAL

SEQ ID NO: 3661 - protein, 75 aa, Homo sapiens
MSIRSAWCRAEFNSWLSLLTFSLVALSNVDSGVLKSPIINVWESHSLCRSLRTYFMNLGAPVLGAYIFRILSSSC

SEQ ID NO: 3662 - protein, 55 aa, Homo sapiens
MVWINQSLLSHSLSVGFRLLSVFLLLYIIRWGASLFVLSCTLVQMVPEGRSKNGK

SEQ ID NO: 3663 - protein, 72 aa, Homo sapiens
  SITE (6): Xaa equals any amino acid
TLDLRXAMLLLTSCVTLGWFPSTQWECQWLHACKDRLRIGGSNLLSTRVPECHHLPRASFVPELAPWKALGH

SEQ ID NO: 3664 - protein, 60 aa, Homo sapiens
MMNASLTMWDATSSQLTLNVMTWVAVVLVPIILLYTAWCYWKMFGRITKEDIERNTHSLY

SEQ ID NO: 3665 - protein, 43 aa, Homo sapiens
AVSLMGFLLRVTQPFSLAALNICSFISTLVNLTIMCLGVALLE

SEQ ID NO: 3666 - protein, 53 aa, Homo sapiens
MGFWCGCPFCLLVFLLTVRTLSCRSVGVCWRSTPDPVCLGISSRGCRTVNIAE

SEQ ID NO: 3667 - protein, 105 aa, Homo sapiens
FWTIVKLAVLVMSLVAVFLSCGLISKNHMLLNLPGILIPHNANHLLPGLFLCPLESLSSHSKIRGPTERALWFEDHGLPFLPLTHHTPFPPLSLSPLPKKKKKKK

SEQ ID NO: 3668 - protein, 28 aa, Homo sapiens
MFIKLIFLVALPLIGKKGGKKSSLIVHR

SEQ ID NO: 3669 - protein, 87 aa, Homo sapiens
KWLGAKMLIIKRSVAIIAILFSPLSTASNLTSQLHNFFSAQLAGVSDEVRVSIRTAPNLLPPCEQPLLSMSNNSRLWGNVNVLARCG

SEQ ID NO: 3670 - protein, 23 aa, Homo sapiens
MVFCGAFKGCFVCLFVCLFVLQG

SEQ ID NO: 3671 - protein, 81 aa, Homo sapiens
MPKMLLAASPFSSLHSQGRGPPFCQPLGLLFVFCFCFVQGLPLSPRLECSGMILAHGNLLGSSSPPVSASRVARTTATTPN

SEQ ID NO: 3672 - protein, 282 aa, Homo sapiens
MSGGWMAQVGAWRTGALGLALLLLLGLGLGLEAAASPLSTPTSAQAAGPSSGSCPPTKFQCRTSGLCVPLTWRCDRDLDCSDGSDEEECRIEPCTQKGQCPPPPGLPCPCTGVSDCSGGTDKKLRNCSRLACLAGELRCTLSDDCIPLTWRCDGHPDCPDSSDELGCGTNEILPEGDATTMGPPVTLESVTSLRNATTMGPPVTLESVPSVGNATSSSAGDQSGSPTAYGVIAAAAVLSASLVTATLLLLSWLRAQERLRPLGLLVAMKESLLLSEQKTSLP

SEQ ID NO: 3673 - protein, 330 aa, Homo sapiens
MAFLPSWVCVLVGSFSASLAGTSNLSETEPPLWKESPGQLSDYRVENSMYIINPWVYLERMGMYKIILNQTARYFAKFAPDNEQNILWGLPLQYGWQYRTGRLADPTRRTNCGYESGDHMCISVDSWWADLNYFLSSLPFLAAVDSGVMGISSDQVRLLPPPKNERKFCYDVSSCRSSFPETMNKWNTFYQYLQSPFSKFDDLLKYLWAAHTSTLADNIKSFEDRYDYYSKAEAHFERSWVLAVDHLAAVLFPTTLIRSYKFQKGMPPRILLNTDVAPFISDFTAFQNVVLVLLNMLDNVDKSIGYLCTEKSNVYRDHSESSSRSYGNNS

SEQ ID NO: 3674 - protein, 155 aa, Homo sapiens [sequence omitted]

SEQ ID NO: 3675 - protein, 83 aa, Homo sapiens
  SITE (61): Xaa equals any amino acid
  SITE (68): Xaa equals any amino acid
  SITE (69): Xaa equals any amino acid
  SITE (70): Xaa equals any amino acid
  SITE (83): Xaa equals any amino acid
MQFSRRFAVRWKAFICFVLLTLKIKACPSLTASSRKCQNQRPSQGPGRAGGPPGPWHCSYXWRAWPSXXXGTGWPDMEGETRX

SEQ ID NO: 3676 - protein, 263 aa, Homo sapiens
  SITE (178): Xaa equals any amino acid
MRSCPEEQYWDPLLGTCMSCKTICNHQSQRTCAAFCRSLSCRKEQGKFYDHLLRDCISCASICGQHPKQCAYFCENKLRSPVNLPPELRRQRSGEVENNSDNSGRYQGLEHRGSEASPALPGLKLSADQVALVYSTLGLCLCAVLCCFLVAVACFLKKRGDPCSCQPRSRPRQSPAKXSQDHAMEAGSPVSTSPEPVETCSFCFPECRAPTQESAVTPGTPDPTCAGRWGCHTRTTVLQPCPHIPDSGLGIVCVPAQEGGPGA

SEQ ID NO: 3677 - protein, 97 aa, Homo sapiens
MGMLLSLYIQALLASADKYMRAQFSWCQDMKIQGTKNLKEQHLDCQGLASSALSPTLQSYASSCGSPVQPATTGPSLYTFLLPLKKSTKEKAWYVES

SEQ ID NO: 3678 - protein, 295 aa, Homo sapiens; identical to SEQ ID NO: 3206

SEQ ID NO: 3679 - protein, 144 aa, Homo sapiens
  SITE (126): Xaa equals any amino acid
  SITE (128): Xaa equals any amino acid
  SITE (138): Xaa equals any amino acid
NMLASSSRIRAAWTRALLLPLLLAGPVGCLSRQELFPFGPGQGDLELEDGDDFVSPALELSGALRFYDRSDIDASTSPQMASLLRVNPRPKNPIPGSSHQHSVQSPLSWRIGHDRWLGKVYYREDXSXPSFTSTDVSXRFPEFF

SEQ ID NO: 3680 - protein, 44 aa, Homo sapiens
MVRNCSLFSLILTLRILRAHLCFPYISMKQGTMKCQIVPLILRA

SEQ ID NO: 3681 - protein, 58 aa, Homo sapiens
MQFTNLSCAILLFSVYAQSSAIINTISFRTFSSSHQKTPELIAVTAHFPPKLSDLGNH

SEQ ID NO: 3682 - protein, 215 aa, Homo sapiens
MRLPAWCRHTTLAISCWHCLVLARASADSASLPTISHLGVKPLSVGWGAPSTLPVSPCGGKPAAPTSASPAAAPLRFWRPGASGGGAGGTRRLALCRLVTARTTLATGTPGLSARPRQRPCLLPVLPRRPAELSVSLEPSPGSSGRGFLCLPFCKRDADTSLGQTLTSSCSLSSILVGGTLRPRCSCPPFTQRSAFHLRTPHNQYHHGSTSLASH

SEQ ID NO: 3683 - protein, 53 aa, Homo sapiens
MRKILSCCSRYEMMCLTHWVLVLTCFLRTLSGTASPRWPQCVRWLEGFWHRKL

SEQ ID NO: 3684 - protein, 141 aa, Homo sapiens
MGAAVLCASFMSFGVKRRWFALGAALQLAISTYAAYIGGYVHYGDWLKRCWGAVPPETSQPLPAVHRPGVPGYLPHLCGLLTAAQQGGPAGVSEPSPRRGADDPAVLRAVWHPGPGLSVRLLRDPRCPDPGCTAAPCHAAH

SEQ ID NO: 3685 - protein, 84 aa, Homo sapiens
NPVSTKNTKISRAWWCVSVMPATQEAETGESLKPRKWSCSESRLRHCTAVWVTERNSITKKKREKLCSRASKVAHACYPSTLGS

SEQ ID NO: 3686 - protein, 56 aa, Homo sapiens
MTVNSDRIFATVIFVLLCCFSFLFCFDFGAKPKRRLESGSKFTKYLGYLYTNFSDD

SEQ ID NO: 3687 - protein, 89 aa, Homo sapiens
MKFLLAALVLSLILPRSSQYIKWIVSAGLAQVSEFSFVLGSRARRAGVISREVYLLILSVTTLSLLLAPVLWRAAITRCVPRPERRSSL

SEQ ID NO: 3688 - protein, 51 aa, Homo sapiens
MFLRKMLMFCHGKRFQTSFFLFLFLLLLRKLMLCFSESNEVEVYKANFLLV

SEQ ID NO: 3689 - protein, 167 aa, Homo sapiens
MLTVALLALLCASASGNAIQARSSSYSGEYGSGGGKRFSHSGNQLDGPITALRVRVNTYYIVGLQVRYGKVWSDYVGGRNGDLEEIFLHPGESVIQVSGKYKWYLKKLVFVTDKGRYLSFGKDSGTSFNAVPLHPNTVLRFISGRSGSLIDAIGLHWDVYPTSCSRC

SEQ ID NO: 3690 - protein, 216 aa, Homo sapiens
  SITE (152): Xaa equals any amino acid
MGAARLLPNLTLCLQLLILCCQTQGENHPSPNFNQYVRDQGAMTDQLSRRQIREYQLYSRTSGKHVQVTGRRISATAEDGNKFAKLIVETDTFGSRVRIKGAESEKYICMNKRGKLIGKPSGKSKDCVFTEIVLENNYTAFQNARHEGWFMXFTRQGRPRQASRSRQNQREAHFIKRLYQGQLPFPNHAEKQKQFEFVGSAPTRRTKRTRRPQPLT

SEQ ID NO: 3691 - protein, 21 aa, Homo sapiens
MACSCLMIQSFSTSALVLFYG

SEQ ID NO: 3692 - protein, 46 aa, Homo sapiens
MWSLRMKQILILHLMTVLNQCLQNSVGKKPSESKILKKNMQGSVRE

SEQ ID NO: 3693 - protein, 82 aa, Homo sapiens
RGKEDFPEDVISKTRPDDKQDWPGKEGKREPGRENSMCEDDSQAKLLLWVPHIQILSDHQSRPTLFFPLWLLFLPIYLDFIV

SEQ ID NO: 3694 - protein, 78 aa, Homo sapiens
MRKPRCTRGIFLFCFLFLFVFETGFCFVAQAGMQWHKHGSLQSQTPGQHDEIPSLLKIEKLAGRGGAHLCSQFLGRLT

SEQ ID NO: 3695 - protein, 53 aa, Homo sapiens
MSLPRGILEHWVSVFSLISLILFLHSLAMCIQIILFNARKLIPLFPRESGFDN

SEQ ID NO: 3696 - protein, 157 aa, Homo sapiens
MAWVQAGLQWAVLAATIKVSVLGSSPQPRGVVPHFIERGFPAHRRARACPRPGAAVEKLGGKPVQPDSKPTCCSQVKAEGLIFAGLTGLKLLPSSLQRAVFVRQCLGFWNDGSRALQMRSDCVLIWQLVGVLLASGLSGDRAPLIVLTACDKAWATV

SEQ ID NO: 3697 - protein, 401 aa, Homo sapiens
MNKLLCCALVFLDISIKWTTQETFPPKYLHYDEKTSHQLLCDKCPPGTYLKQHCTAKWKTVCAPCPDHYYTDSWHTSDECLYCSPVCKELQYVKQECNRTHNRVCECKEGRYLEIEFCLKHRSCPPGFGVVQAGTPERNTVCKRCPDGFFSNETSSKAPCRKHTNCSVFGLLLTQKGNATHDNICSGNSESTQKCGIDVTLCEEAFFRFAVPTKFTPNWLSVLVDNLPGTKVNAESVERIKRQHSSQEQTFQLLKLWKHQNKDQDIVKKIIQDIDLCENSVQRHIGHANLTFEQLRSLMESLPGKKVGAEDIEKTIKACKPSDQILKLLSLWRIKNGDQDTLKGLMHALNHSKTYHFPKTVTQSLKKTIRFLHSFTMYKLYQKLFLEMIGNQVQSVKISCL

SEQ ID NO: 3698 - protein, 12 aa, Homo sapiens
TKTFILMIFLML

SEQ ID NO: 3699 - protein, 37 aa, Homo sapiens
MHILIPQLFLQQISAMCLTKMEVSQIQILLHLRPTED

SEQ ID NO: 3700 - protein, 55 aa, Homo sapiens
MLRCWPLFWLPLVSPFCSLFWLLVEWFGTNIDREKLRRNRRSILDDSFKLLSFKQ

SEQ ID NO: 3701 - protein, 250 aa, Homo sapiens
MRGTPKTHLLAFSLLCLLSKVRTQLCPTPCTCPWPPPRCPLGVPLVLDGCGCCRVCARRLGEPCDQLHVCDASQGLVCQPGAGPGGRGALCLLAEDDSSCEVNGRLYREGETFQPHCSIRCRCEDGGFTCVPLCSEDVRLPSWDCPHPRRVEVLGKCCPEWVCGQGGGLGTQPLPAQGPQFSGLVSSLPPGVPCPEWSTAWGPCSTTCGLGMATRVSNQNRFCRLETQRRLCLSRPCPPSRGRSPQNSAF

SEQ ID NO: 3702 - protein, 557 aa, Homo sapiens
MPERDSEPFSNPLAPDGHDVDDPHSFHQSKLTNEDFRKLLMTPRAAPTSAPPSKSRHHEMPREYNEDEDPAARRRKKKSYYAKLRQQEIERERELAEKYRDRAKERRDGVNKDYEETELISTTANYRAVGPTAEADKSAAEKRRQLIQESKFLGGDMEHTHLVKGLDFALLQKVRAEIASKEKEEEELMEKPQKETKKDEDPENKIEFKTRLGRNVYRMLFKSKAYERNELFLPGRMAYVVDLDDEYADTDIPTTLIRSKADCPTMEAQTTLTTNDIVISKLTQILSYLRQGTRNKKLKKKDKGKLEEKKPPEADMNIFEDIGDYVPSTTKTPRDKERERYRERERDRERDRDRDRERERERDRERERERDREREEEKKRHSYFEKPKVDDEPMDVDKGPGSTKELIKSINEKFAGSAGWEGTESLKKPEDKKQLGDFFGMSNSYAECYPATMDDMAVDSDEEVDYSKMDQGNKKGPLGRWDFDTQEEYSEYMNNKEALPKAAFQYGIKMSEGRKTRRFKETNDKAELDRQWKKISAIIEKRKKMEADGVEVKRPKY

SEQ ID NO: 3703 - protein, 69 aa, Homo sapiens
  SITE (65): Xaa equals any amino acid
  SITE (69): Xaa equals any amino acid
MELRSHLGATCLLGFSFLLLVTSSDGHIGLGKVLGDHIHWRDTRGWEEGSTAHGVASEGWIIHNXWLWX

SEQ ID NO: 3704 - protein, 415 aa, Homo sapiens
MRFLLLTSTCCLLAMALAAEVKKPAAPGTAEKLSPKAATLAERSAGLAFSLYQAMAKDQAVENILLSPVVVASSLGLVSLGGKATTASQAKAVLSAEQLRDEEVHAGLGELLRAFSNSTARNVTWKLGSRLYGPSSVSFAEDFVRSSKQHYNCEHSKINFRDKRSALQSINEWAAQTTDGKLPEVTKDVERTDGALLVNAMFFKPHWDEKFHHKMVDNRGFMVTRSYTVGVTMMHRTGLYNYYDDEKEKLQMVEMPLAHKLSSLLILMPHHVEPLERLEKLLTKEQLKIWMGKMQKKAVAISLPKGVVEVTHDLQKHLAGLGLTEAIDKNKADLSRMSGKKDLYLASVFHATAFEWDTEGNPFDQDIYGREELRSPKLFYADHPFIFLVRDTQTGSLLFIGRLVRPKGDKMRDEL

SEQ ID NO: 3705 - protein, 214 aa, Homo sapiens; identical to SEQ ID NO: 3169
  SITE (208): Xaa equals any amino acid

SEQ ID NO: 3706 - protein, 509 aa, Homo sapiens
MTSSRLWFSLLLAAAFAGRATALWPWPQNFQTSDQRYVLYPNNFQFQYDVSSAAQPGCSVLDEAFQRYRDLLFGSGSWPRPYLTGKRHTLEKNVLVVSVVTPGCNQLPTLESVENYTLTINDDQCLLLSETVWGALRGLETFSQLVWKSAEGTFFINKTEIEDFPRFPHRGLLLDTSRHYLPLSSILDTLDVMAYNKLNVFHWHLVDDPSFPYESFTFPELMRKGSYNPVTHIYTAQDVKEVIEYARLRGIRVLAEFDTPGHTLSWGPGIPGLLTPCYSGSEPSGTFGPVNPSLNNTYEFMSTFFLEVSSVFPDFYLHLGGDEVDFTCWKSNPEIQDFMRKKGFGEDFKQLESFYIQTLLDIVSSYGKGYVVWQEVFDNKVKIQPDTIIQVWREDIPVNYMKELELVTKAGFRALLSAPWYLNRISYGPDWKDFYVVEPLAFEGTPEQKALVIGGEACMWGEYVDNTNLVPRLWPRAGAVAERLWSNKLTSDLTFAYERLSHFRCELLR

SEQ ID NO: 3707 - protein, 253 aa, Homo sapiens
MMMKIPWGSIPVLMLLLLLGLIDISQAQLSCTGPPAIPGIPGIPGTPGPDGQPGTPGIKGEKGLPGLAGDHGEFGEKGDPGIPGNPGKVGPKGPMGPKGGPGAPGAPGPKGESGDYKATQKIAFSATRTINVPLRRDQTIRFDHVITNMNNNYEPRSGKFTCKVPGLYYFTYHASSRGNLCVNLMRGRERAQKVVTFCDYAYNTFQVTTGGMVLKLEQGENVFLQATDKNSLLGMEGANSIFSGFLLFPDMEA

SEQ ID NO: 3708 - protein, 199 aa, Homo sapiens
MYILGICLIIELIGGVVALIFRNQTIDFLNDNIRRGIENYYDDLDFKNIMDFVQKKFKCCGGEDYRDWSKNQYHDCNAPGPLACGVPYTCCVRNTTEVVNTMCGYKTIDKERLSVQDVIYVRGCTNAVLIWFMDNYTIMAGLLLGILLPQFLGVLLTFLYITRVEDIIMEHSVTDGLLGPGAKPSVEAAGTGCCMCYPN

SEQ ID NO: 3709 - protein, 55 aa, Homo sapiens
MCLLGGLSAPPLLLLPLLPLLLCPPTGRVTAAFPQSYLMPYKVWVTNRVFLKNSQ

SEQ ID NO: 3710 - protein, 301 aa, Homo sapiens
MEVLAWLLVYLFGPGWVPSTLAALVLATSQAQCWCLQHDLGHTSVFRESQWNHVAQQFVMGQLKGFSAHWWNFRHFQHHAKPNIFHKDPDVTVAPVFLLGESSVEYGKKKRRYLPYHRQHLYFFLIGPPLLTLVNFEVENLAYMLVCMQWTDLLWAASFYSRFFLCYAPFYGLPGALLLFVAVRVLESHWFVWITQMNHIPKEIGHEKHRDWASSQLAATCNVEPSLFIDWFSGHLNFQIEHHLFPTMPRHNYRRVAPLVKALCAKHGLNYEVKPFLTALVDIVGSLKKSGDVWLEAYLHQ

SEQ ID NO: 3711 - protein, 33 aa, Homo sapiens
  SITE (12): Xaa equals any amino acid
MSSWTSWMWCAXSCMLGSGQLRFGMTQTGRPPC

SEQ ID NO: 3712 - protein, 250 aa, Homo sapiens
MGPVRLGMLLFILAVYGAWVATPKEEDDDTERLPSKCEVCKLLSLELQEKLSRTGRSREVLELGQVLDTGKRKRHIPYSVSETRLEEALENLCDRILDYSVHAERKGSLRYAKGQSQTMATLKGLVQKGVKVDLGIPLELWDEPSVEVTFLKKQCETMLEEFEDVVGDWYFHHQEQPLQHFLCEGHVLPPAEMHVYRKLGLERKRSRMGKRRQKGRRNTIRRRKKRKRRKRGSTHQGTPSMTLRISDSCL

SEQ ID NO: 3713 - protein, 47 aa, Homo sapiens
MVELTLIHITIYLYCLGMCGCSSVGEINCQCSPACKNLVRELKHLNK

SEQ ID NO: 3714 - protein, 453 aa, Homo sapiens
MKLLVILIFSGLITCCGGNSSHSLPSKLLLVSFDGFRADYLQNYEFPHLQNFIKEGVLVEHVKNVFITKTFPNHYSIVTGLYEESHGIVANSMYDVITKKHFSDFDDKDPFWWNEAVPIWVTNQLQENRSSAAAMWPGTDVPIHNTTPSYFMNYSSSVSFEERLNNITMWLMNSNPPVTFATLYWEEPDASGHKYGPEDKENMYRVLKEVDDLIGELVHKLKVLGLWENLNVIITSDHGMTQCSKDKLINLDLCIDRSSYTLVDLTPVAAVLPKINTTEVYNKLKVCNPHMNVYLKEDIPARFHYQHNDRIQPIILVADEGWTIVLNKSLPKLGDHGYDNSLSSMHPFLAAHGPAFHKGYKHSTINSVDIYPMMCHILGLKPHPNNGTFGHTKCLLVDQWCINLPEAIGIVIGALLVLTTLTCLIIIMQNRLSVPRPFSRLQLQEDDDDPLIE

SEQ ID NO: 3715 - protein, 351 aa, Homo sapiens
MAALVVLLSLLAAGVLGNEFSILRSPGSVVFRDGNWPIPGERIPDVAALSMGFSVKEDLSWPGLAVGNLFHRPRATVMVMVKGVDKLALPPGRVISYPLENAVPFSLDSVANSIHSLFSEETPVVLQLAPSEERVYMVGKANSVFEDLSVTLRQLRNRLFQENSVLNSLPLNSLSRNSEVDLLFLSELQVLHDISSLLSRHKHLAKDHSPDLYSLELAGLDEIGKHYGEDSEQFRDASKILVDALQKFADDMYNLYGGNAVVELVTVRSFDTSLVRKTRTILEAKQAKSPSSPYNLAYKYNLEYAVVFNMVLWIMIALALAVIITSYNIWNMDPGYDSIIYRMTNQKIRMD

SEQ ID NO: 3716 - protein, 92 aa, Homo sapiens
MAAGSVGSLRPAFALRLLLAAVLQAVSAFGAEFSSEACRELGFSSNLLCSSCDLLGQFNLLQLDPDCRGCCQEEAQFETKKLYAGAILEVCG

SEQ ID NO: 3717 - protein, 95 aa, Homo sapiens
MQMATFAINYKGPPFMESLPENKPLVWSLAVSLLAIIGLLLGSSPDFNSQFGLVDIPVEFKLVIAQVLLLDFCLALLADRVLQFFLGTPKLKVPS

SEQ ID NO: 3718 - protein, 7 aa, Homo sapiens
VWSEPAR

SEQ ID NO: 3719 - protein, 248 aa, Homo sapiens
MKKLMVVLSLIAAAWAEEQNKLVHGGPCDKTSHPYQAALYTSGHLLCGGVLIHPLWVLTAAHCKKPNLQVFLGKHNLRQRESSQEQSSVVRAVIHPDYDAASHDQDIMLLRLARPAKLSELIQPLPWRGTAQPTPPAATSWAGARQQMVISLTPSSVHTSTWCPVRSVSMPTLARSPRTCCVLGMRSTGRIPARVILGVRWYVETTSEALCHGVTSPVDQRRSQESTPTSADTRTGSKKPFRPSDPDM

SEQ ID NO: 3720 - protein, 523 aa, Homo sapiens [sequence omitted]

SEQ ID NO: 3721 - protein, 22 aa, Homo sapiens
MLETKATRPLPPQVLSPLHLFW

SEQ ID NO: 3722 - protein, 59 aa, Homo sapiens
MAAGSSLNENSVGNCSAWQSFFVVFHLISLPSESGIQLTCSFRLFTESESANVVLEAPP

SEQ ID NO: 3723 - protein, 473 aa, Homo sapiens
MASCVGSRTLSKDDVNYKMHFRMINEQQVEDITIDFFYRPHTITLLSFTIVSLMYFAFTRDDSVPEDNIWRGILSVIFFFLIISVLAFPNGPFTRPHPALWRMVFGLSVLYFLFLVFLLFLNFEQVKSLMYWLDPNLRYATREADVMEYAVNCHVITWERIISHFDIFAFGHFWGWAMKALLIRSYGLCWTISITWELTELFFMHLLPNFAECWWDQVILDILLCNGGGIWLGMVVCRFLEMRTYHWASFKDIHTTTGKIKRAVLQFTPASWTYVRWFDPKSSFQRVAGVYLFMIIWQLTELNTFFLKHIFVFQASHPLSWGRILFIGGITAPTVRQYYAYLTDTQCKRVGTQCWVFGVIGFLEAIVCIKFGQDLFSKTQILYVVLWLLCVAFTTFLCLYGMIWYAEHYGHREKTYSECEDGTYSPEISWHHRKGTKGSEDSPPKHAGNNESHSSRRRNRHSKSKVTNGVGKK

SEQ ID NO: 3724 - protein, 109 aa, Homo sapiens
  SITE (79): Xaa equals any amino acid
  SITE (81): Xaa equals any amino acid
  SITE (104): Xaa equals any amino acid
RNAKRCCPHPLRPEGSGAMGPEALSSLLLLLLVASGDADMKGHFDPAKCRYALGMQDRTIPDSDISASSSWSDSTAARXRXWKSSERGWGLVARRFGVSQGGRXTCKWD

SEQ ID NO: 3725 - protein, 779 aa, Homo sapiens
MIPFLPMFSLLLLLIVNPINANNHYDKILAHSRIRGRDQGPNVCALQQILGTKKKYFSTCKNWYKKSICGQKTTVLYECCPGYMRMEGMKGCPAVLPIDHVYGTLGIVGATTTQRYSDASKLREEIEGKGSFTYFAPSNEAWDNLDSDIRRGLESNVNVELLNALHSHMINKRMLTKDLKNGMIIPSMYNNLGLFINHYPNGVVTVNCARIIHGNQIATNGVVHVIDRVLTQIGTSIQDFIEAEDDLSSFRAAAITSDILEALGRDGHFTLFAPTNEAFEKLPRGVLERIMGDKVASEALMKYHILNTLQCSESIMGGAVFETLEGNTIEIGCDGDSITVNGIKMVNKKDIVTNNGVIHLIDQVLIPDSAKQVIELAGKQQTTFTDLVAQLGLASALRPDGEYTLLAPVNNAFSDDTLSMDQRLLKLILQNHILKVKVGLNELYNGQILETIGGKQLRVFVYRTAVCIENSCMEKGSKQGRNGAIHIFREIIKPAEKSLHEKLKQDKRFSTFLSLLEAADLKELLTQPGDWTLFVPTNDAFKGMTSEEKEILIRDKNALQNIILYHLTPGVFIGKGFEPGVTNILKTTQGSKIFLKEVNDTLLVNELKSKESDIMTTNGVIHVVDKLLYPADTPVGNDQLLEILNKLIKYIQIKFVRGSTFKEIPVTVYKPIIKKYTKIIDGVPVEITEKETREERIITGPEIKYTRISTGGGETEETLKKLLQEEVTKVTKFIEGGDGHLFEDEEIKRLLQGDTPVRKLQANKKVQGSRRRLREGRSQ

SEQ ID NO: 3726 - protein, 337 aa, Homo sapiens
  SITE (158): Xaa equals any amino acid
  SITE (186): Xaa equals any amino acid
  SITE (321): Xaa equals any amino acid
  SITE (324): Xaa equals any amino acid
  SITE (328): Xaa equals any amino acid
  SITE (334): Xaa equals any amino acid
MDTKLMCLLFFFSLPPLLVSNHTGRIKVVFTPSICKVTCTKGSCQNSCEKGNTTTLISENGHAADTLTATNFRVVICHLPCMNGGQCSSRDKCQCPPNFTGKLCQIPVHGASVPKLYQHSQQPGKALGTHVIHSTHTLPLTVTSQQGVKVKFPPNIVXIHVKHPPEASVQIHQVSRIDGPTGQKTXEAQPGQSQVSYQGLPVQKTQTIHSTYSHQQVIPHVYPVAAKTQLGRCFQETIGSQCGKALPGLSKQEDCCGTVGTSWGFNKCQKCPKKPSYHGYNQMMECLPGYKRVNNTFCQDINECQLQGVCPNGECLNTMGXYRXTLQXRILGPXLTF

SEQ ID NO: 3727 - protein, 581 aa, Homo sapiens
  SITE (131): Xaa equals any amino acid
MARGSWALEASSVMPPTSANWWPSGRARTATAIQLFYTKIFLDPEKREQINITLDHRCRIFQNLDGALDEVVLKFEMGHVRARNLAYDTLPVLIHGNGPTKLQLNYLGNYIPRFWTFETGCTVCDEGLRSXKGIGDEALPTVLVGVFIEQPTPFVSLFFQRLLRLHYPQKHMRLFIHNHEQHHKAQVEEFLAQHGSEYQSVKLVGPEVRMANADARNMGADLCRQDRSCTYYFSVDADVALTEPNSLRLLIQQNKNVIAPLMTRHGRLWSNFWGALSADGYYARSEDYVDIVQGRRVGVWNVPYISNIYLIKGSALRGELQSSDLFHHSKLDPDMAFCANIRQQDVFMFLTNRHTLGHLLSLDSYRTTHLHNDLWEVFSNPEDWKEKYIHQNYTKALAGKLVETPCPDVYWFPIFTEVACDELVEEMEHFGQWSLGNNKDNRIQGGYENVPTIDIHMNQIGFEREWHKFLLEYIAPMTEKLYPGYYTRAQFDLAFVVRYKPDEQPSLMPHHDASTFTINIALNRVGVDYEGGGCRFLRYNCSIRAPRKGWTLMHPGRLTHYHEGLPTTRGTRYIAVSFVDP

SEQ ID NO: 3728 - protein, 368 aa, Homo sapiens
  SITE (342): Xaa equals any amino acid
MRVAGREGRFLSAGVAAREGSAMFLSILVALCLWLHLALGVRGAPCEAVRIPMCRHMPWNITRMPNHLHHSTQENAILAIEQYEELVDVNCSAVLRFFLCAMYAPICTLEFLHDPIKPCKSVCQRARDDCEPLMKMYNHSWPESLACDELPVYDRGVCISPEAIVTDLPEDVKWIDITPDMMVQERPLDVDCKRLSPDRCKCKKVKPTLATYLSKNYSYVIHAKIKAVQRSGCNEVTTVVDVKEIFKSSSPIPRTQVPLITNSSCQCPHILPHQDVLIMCYEWRSRMMLLENCLVEKWRDQLSKRSIQWEERLQEQRRTVQDKKKTAGRTSRSNPPKPKGKXPAPKPASPKKNIKTRSAQKRTNPKRV

SEQ ID NO: 3729 - protein, 144 aa, Homo sapiens
  SITE (111): Xaa equals any amino acid
MVWRLVLLALWVWPSTQAGHQDKDTTFDLFSISNINRKTIGAKQFRGPDPGVPAYRFVRFDYIPPVNADDLSKITKIMRQKEGFFLTAQLKQDGKSRGTLLALEGPGLSQXQFEIVSNGPADTLDLTYWIDGTRHVVSLEDVGC

SEQ ID NO: 3730 - protein, 216 aa, Homo sapiens
  SITE (191): Xaa equals any amino acid
  SITE (192): Xaa equals any amino acid
  SITE (204): Xaa equals any amino acid
SACAWRLPSPGPSAMWPLWRLVSLLALSQALPFEQRGFWDFTLDDGPFMMNDEEASGADTSGVLDPDSVTPTYSAMCPFGCHCHLRVVQCSDLGLKSVPKEISPDTTLLDLQNNDISELRKDDFKGLQHLYALVLVNNKISKIHEKAFSPLRKCRSSTSPRTTWWRSRPTYPAPWWSPHPRQRIRKCPRMXXGRTECMNGGPWXMLNELDAESYWH

SEQ ID NO: 3731 - protein, 757 aa, Homo sapiens
MVPDTACVLLLTLAALGASGQGQSPLGSDLGPQMLRELQETNAALQDVRELLRQQVREITFLKNTVMECDACGMQQSVRTGLPSVRPLLHCAPGFCFPGVACIQTESGARCGPCPAGFTGNGSHCTDVNECNAHPCFPRVRCINTSPGFRCEACPPGYSGPTHQGVGLAFAKANKQVCTDINECETGQHNCVPNSVCINTRGSFQCGPCQPGFVGDQASGCQRRAQRFCPDGSPSECHEHADCVLERDGSRSCVCAVGWAGNGILCGRDTDLDGFPDEKLRCPERQCRKDNCVTVPNSGQEDVDRDGIGDACDPDADGDGVPNEKDNCPLVRNPDQRNTDEDKWGDACDNCRSQKNDDQKDTDQDGRGDACDDDIDGDRIRNQADNCPRVPNSDQKDSDGDGIGDACDNCPQKSNPDQADVDHDFVGDACDSDQDQDGDGHQDSRDNCPTVPNSAQEDSDHDGQGDACDDDDDNDGVPDSRDNCRLVPNPGQEDADRDGVGDVCQDDFDADKVVDKIDVCPENAEVTLTDFRAFQTVVLDPEGDAQIDPNWVVLNQGREIVQTMNSDPGLAVGYTAFNGVDFEGTFHVNTVTDDDYAGFIFGYQDSSSFYVVMWKQMEQTYWQANPFRAVAEPGIQLKAVKSSTGPGEQLRNALWHTGDTESQVRLLWKDPRNVGWKDKKSYRWFLQHRPQVGYIRVRFYEGPELVADSNVVLDTTMRGGRLGVFCFSQENIIWANLRYRCNDTIPEDYETHQLRQA

SEQ ID NO: 3732 - protein, 774 aa, Homo sapiens
MERPLCSHLCSCLAMLALLSPLSLAQYDSWPHYPEYFQQPAPEYHQPQAPANVAKIQLRLAGQKRKHSEGRVEVYYDGQWGTVCDDDFSIHAAHVVCRELGHVEAKSWTASSSYGKGEGPIWLDNLHCTGNEATLAACTSNGWGVTDCKHTEDVGVVCSDKRIPGFKFDNSLINQIENLNIQVEDIRIRAILSTYRKRTPVMEGYVEVKEGKTWKQICDKHWTAKNSRVVCGMFGFPGERTYNTKVYKMFASRRKQRYWPFSMDCTGTEAHISSCKLGPQVSLDPMKNVTCENGLPAVVSCVPGQVFSPDGPSRFRKAYKPEQPLVRLRGGAYIGEGRVEVLKNGEWGTVCDDKWDLVSASVVCRELGFGSAKEAVTGSRLGQGIGPIHLNEIQCTGNEKSIIDCKFNAESQGCNHEEDAGVRCNTPAMGLQKKLRLNGGRNPYEGRVEVLVERNGSLVWGMVCGQNWGIVEAMVVCRQLGLGFASNAFQETWYWHGDVNSNKVVMSGVKCSGTELSLAHCRHDGEDVACPQGGVQYGAGVACSETAPDLVLNAEMVQQTTYLEDRPMFMLQCAMEENCLSASAAQTDPTTGYRRLLRFSSQIHNNGQSDFRPKNGRHAWIWHDCHRHYHSMEVFTHYDLLNLNGTKVAEGHKASFCLEDTECEGDIQKNYECANFGDQGITMGCWDMYRHDIDCQWVDITDVPPGDYLFQVVINPNFEVAESDYSNNIMKCRSRYDGHRIWMYNCHIGGSFSEETEKKFEHFSGLLNNQLSPQ

SEQ ID NO: 3733 - protein, 1054 aa, Homo sapiens
MECCRRATPGTLLLFLAFLLLSSRTARSEEDRDGLWDAWGPWSECSRTCGGGASYSLRRCLSSKSCEGRNIRYRTCSNVDCPPEAGDFRAQQCSAHNDVKHHGQFYEWLPVSNDPDNPCSLKCQAKGTTLVVELAPKVLDGTRCYTESLDMCISGLCQIVGCDHQLGSTVKEDNCGVCNGDGSTCRLVRGQYKSQLSATKSDDTVVAIPYGSRHIRLVLKGPDHLYLETKTLQGTKGENSLSSTGTFLVDNSSVDFQKFPDKEILRMAGPLTADFIVKIRNSGSADSTVQFIFYQPIIHRWRETDFFPCSATCGGGYQLTSAECYDLRSNRVVADQYCHYYPENIKPKPKLQECNLDPCPARWEATPWTACSSSCGGGIQSRAVSCVEEDIQGHVTSVEEWKCMYTPKMPIAQPCNIFDCPKWLAQEWSPCTVTCGQGLRYRVVLCIDHRGMHTGGCSPKTKPHIKEECIVPTPCYKPKEKLPVEAKLPWFKQAQELEEGAAVSEEPSFIPKAWSACTVTCGVGTQVRIVRCQVLLSFSQSVADLPIDECEGPKPASQRACYAGPCSGEIPEFNPDETDGLFGGLQDFDELYDWEYEGFTKCSESCGGGVQEAVVSCLNKQTREPAEENLCVTSRRPPQLLKSCNLDPCPARWEIGKWSPCSLTCGVGLQTRDVFCSHLLSREMNETVILADELCRQPKPSTVQACNRFNCPPAWYPAQWQPCSRTCGGGVQKREVLCKQRMADGSFLELPETFCSASKPACQQACKKDDCPSEWLLSDWTECSTSCGEGTQTRSAICRKMLKTGLSTVVNSTLCPPLPFSSSIRPCMLATCARPGRPSTKHSPHIAAARKVYIQTRRQRKLHFVVGGFAYLLPKTAVVLRCPARRVRKPLITWEKDGQHLISSTHVTVAPFGYLKIHRLKPSDAGVYTCSAGPAREHFVIKLIGGNRKLVARPLSPRSEEEVLAGRKGGPKEALQTHKHQKGSSPTAARRRSGAWPPTRGAATTTSSPGCWSRAAGPESCWPRGRRRTLRKGTRPRRRTRVQSKCSCTCPSPW

SEQ ID NO: 3734 - protein, 84 aa, Homo sapiens
  SITE (18): Xaa equals any amino acid
  SITE (19): Xaa equals any amino acid
  SITE (21): Xaa equals any amino acid
YMPTGADPLRGGDACIYXXKXSYGSFGRSLLSYLDNCGNSRANTCRRALTPFAGGMRAFIRSKPTRRGADRGRRGREFPGRRAH

SEQ ID NO: 3735 - protein, 14 aa, Homo sapiens
WWWCWLWWLLLPMG

SEQ ID NO: 3736 - protein, 46 aa, Homo sapiens
VFLWSLEQPASWARCWGLWRTHGTCPESRRGYISPYFCLHFVLLKK

SEQ ID NO: 3737 - protein, 419 aa, Homo sapiens; identical to SEQ ID NO: 3228
  SITE (3): Xaa equals any amino acid

SEQ ID NO: 3738 - protein, 365 aa, Homo sapiens
MWGLKVLLLPVVSFALYPEEILDTHWELWKKTHRKQYNNKVDEISRRLIWEKNLKYISIHNLEASLGVHTYELAMNHLGDMTSEEVVQKMTGLKVPLSHSRSNDTLYIPEWEGRAPDSVDYRKKGYVTPVKNQGQCGSCWAFSSVGALEGQLKKKTGKLLNLSPQNLVDCVSENDGCGGGYMTNAFQYVQKNRGIDSEDAYPYVGQEESCMYNPTGKAAKCRGYREIPEGNEKALKRAVARVGPVSVAIDASLTSFQFYSKGVYYDESCNSDNLNHAVLAVGYGIQKGNKHWIIKNSWGENWETKDISSWLEIRTTPVALPTWPASPRCDSSQPNPSCSSISSTMVQCNDALWKGVGVLFLKQMW

SEQ ID NO: 3739 - protein, 103 aa, Homo sapiens
MLAFFMAFIFNWLGFCLSFCITNTIAGRYGAICGFGLSLIKWILIVRFSDYFTGYFNGQYWLWWIFLVLGLLLFFRGFVNYLKVRNMSESMAAAHRTRYFFLL

SEQ ID NO: 3740 - protein, 59 aa, Homo sapiens
MGAIFTLAALKESLSTCIPAIVCLGFLLLLNVGQLLAQTKKVVRPTRKKTLSTFKESWK

SEQ ID NO: 3741 - protein, 18 aa, Homo sapiens
HVTLLCPKPQILLQPIKV

SEQ ID NO: 3742 - protein, 28 aa, Homo sapiens
MLPSSEKFGSCYSQYVYLFAQSVYFISL

SEQ ID NO: 3743 - protein, 56 aa, Homo sapiens
MFSLLFCSTLILHLATGMEHVINSFFSQASKGIKHFISQPYAHQVSQCYTVILCIQ

SEQ ID NO: 3744 - protein, 248 aa, Homo sapiens
MAMLPLVLHWFFIEWYSGKKSSSALFQHITALFECSMAAIITLLVSDPVGVLYIRSCRVLMLSDWYTMLYNPSPDYVTTVHCTHEAVYPLYTIVFIYYAFCLVLMMLLRPLLVKKIACGLGKSDRFKSIYAALYFFPILTVLQAVGGGLLYYAFPYIILVLSLVTLAVYMSASEIENCYDLLVRKKRLIVLFSHWLLHAYGIISISRVDKLEQDLPLLALVPTPALFYLFTAKFTEPSRILSEGANGH

SEQ ID NO: 3745 - protein, 35 aa, Homo sapiens
MPTYHSERLVFLFVFLHIAVSVLHLVFSALSKFKF

SEQ ID NO: 3746 - protein, 1 aa, Homo sapiens
M

SEQ ID NO: 3747 - protein, 33 aa, Homo sapiens
MHTLQICSSVLKVVSLFFGWLFLRLGLALLPRI

SEQ ID NO: 3748 - protein, 268 aa, Homo sapiens [sequence omitted]

SEQ ID NO: 3749 - protein, 162 aa, Homo sapiens
MDTIFLWSLLLLFFGSQASRCSAQKNTEFAVDLYQEVSLSHKDNIIFSPLGITLVLEMVQLGAKGKAQQQIRQTLKQQETSAGEEFFVLKSFFSAISEKKQEFTFNLANALYLSRRIHCERTVSPWQQGIFSECYKTGGFSRCKGLCRDDKYLGRKKNRWKN

SEQ ID NO: 3750 - protein, 45 aa, Homo sapiens
MLRAELKIAVVLFAFHLLLSFILGSLLSINSCCEEEKLNKSWLKF

SEQ ID NO: 3751 - protein, 68 aa, Homo sapiens
MFEATRLLATIVMLLCFIFTLCAALWWHKKGLAVLFCILQFLSMTWYSLSYIPYARDAVIKCCSSLLS

SEQ ID NO: 3752 - protein, 234 aa, Homo sapiens; identical to SEQ ID NO: 3542

SEQ ID NO: 3753 - protein, 344 aa, Homo sapiens
MDFLVLFLFYLASVLMGLVLICVCSKTHSLKGLARGGAQIFSCIIPECLQRAVHGLLHYLFHTRNHTFIVLHLVLQGMVYTEYTWEVFGYCQELELSLHYLLLPYLLLGVNLFFFTLTCGTNPGIITKANELLFLHVYEFDEVMFPKNVRCSTCDLRKPARSKHCSVCNWCVHRFDHHCVWVNNCIGAWNIRYFLIYVLTLTASAATVAIVSTTFLVHLVVMSDLYQETYIDDLGHLHVMDTVFLIQYLFLTFPRIVFMLGFVVVLSFLLGGYLLFVLYLAATNQTTNEWYRGDWAWCQRCPLVAWPPSAEPQVHRNIHSHGLRSNLQEIFLPAFPCHERKKQE

SEQ ID NO: 3754 - protein, 53 aa, Homo sapiens
MLKAFFRTLQAMLLGVWILLLLASLAPLWLYCWRMFPTKGKRDQKEMLEVSGI

SEQ ID NO: 3755 - protein, 59 aa, Homo sapiens
MGHNVLPLFMPVFLFFVFPGYSIFCILPCLVLDIFVNLYISLHLFLECDQVTWKKKKKK

SEQ ID NO: 3756 - protein, 170 aa, Homo sapiens [sequence omitted]

SEQ ID NO: 3757 - protein, 319 aa, Homo sapiens
MHPAVFLSLPDLRCSLLLLVTWVFTPVTTEITSLDTENIDEILNNADVALVNFYADWCRFSQMLHPIFEEASDVIKEEFPNENQVVFARVDCDQHSDIAQRYRISKYPNLKLFRNGMMMKREYRGQRSVKALADYIRQQKSDPIQEIRDLAEITTLDRSKRNIIGYFEQKDSDNYRVFERVANILHDDCAFLSAFGDVSKPERYSGDNIIYKPPGHSAPDMVYLGAMTNFDVTYNWIQDKCVPLVREITFENGEELTEEGLPFLILFHMKEDTESLEIFQNEVARQLISEKGTINFYMPIVTNLDILFCTYRKLQQIVL

SEQ ID NO: 3758 - protein, 66 aa, Homo sapiens
MHRPEAMLLLLTLALLGGPTWAGKMYGPGGGKYFSTTEDYDHEITGLRVSVGLLLVKRFLEGVIYE

SEQ ID NO: 3759 - protein, 27 aa, Homo sapiens
  SITE (18): Xaa equals any amino acid
MAAVSMQCDCVLGTLPGXHSVVSVLVT

SEQ ID NO: 3760 - protein, 110 aa, Homo sapiens
MKASQCCCCLSHLLASVLLLLLLPELSGPLAVLLQAAEAAPGLGPPDPRPRTLPPLPPGPTPAQQPGRGLAEAAGPRGSEGGNGSNPVAGLETDDHGGKAGEARWVAALL

SEQ ID NO: 3761 - protein, 226 aa, Homo sapiens
HEGRVSAPVPGKMVLGGCPVSYLLLCGQAALLLGNLLLLHCVSRSHSQNATAEPELTSAGAAQPEGPGGAASWEYGDPHSPVILCSYLPDEFIECEDPVDHVGNATASQELGYGCLKFGGQAYSDVEHTSVQCHALDGIECASPRTFLRENKPCIKYTGHYFITTLLYSFFLGCFGVDRFCLGHTGTAVGKLLTLGGLGIWWFVDLILLITGGLMPSDGSNWCTVY

SEQ ID NO: 3762 - protein, 10 aa, Homo sapiens
KQGALGLCIS

SEQ ID NO: 3763 - protein, 59 aa, Homo sapiens
MGAVWSALLVGGGLAGALFVWLLRGGPGDTGKDGDADRRKTPLLGELRFREAIRVAAAD

SEQ ID NO: 3764 - protein, 123 aa, Homo sapiens
MDLLSFFFFFFLRQNLALSPRLERSGTISAHCNLRLPGSSNYPVSASRVAGITGAHHQARLIFVFLVETGFHYIGQAGLKLLTSSDPLTSASQSAGITGVGHRTQPLSFCYRLVCIFYHFIQM

SEQ ID NO: 3765 - protein, 107 aa, Homo sapiens
MSLAGSLGVAGTLRFALCSFQYSRQCRSWEWMKRHMSQAWAAHTSSSTQSLQNKVLKFPFSGSNAWFSMRASPKPMASTARVRMKRRVTPKTAAQALNSFSLFSSAK

SEQ ID NO: 3766 - protein, 201 aa, Homo sapiens [sequence omitted]

SEQ ID NO: 3767 - protein, 61 aa, Homo sapiens
EFQFLSTSSPTLIIFLFLFLKKISYGHLSGCEVVSHCVFYLHFLCNELETKVQTRWDIQSL

SEQ ID NO: 3768 - protein, 95 aa, Homo sapiens
MPLPWSLALPLLLSWVAGGFGNAASARHHGLLASARQPGVCHYGTKLACCYGWRRNSKGVCEATCEPGCKFGECVGPNKCRCFPGYTGKTLQSRC

SEQ ID NO: 3769 - protein, 76 aa, Homo sapiens
MLWFANFFTYLFLSQSVAFVHISHIGVRQVNTNCYFSRKSYCYVILNPINCIKVKKKKKKKKKKKKKKKKKKKKKK

SEQ ID NO: 3770 - protein, 58 aa, Homo sapiens
MVGNVSVHMLVPALLPMLSVLNVNEACGTMEAEYSVVLFAITFSVKMINLSIKPAARF

SEQ ID NO: 3771 - protein, 67 aa, Homo sapiens
MSIHHVTLLFICHHLFPCTHTLNILVWAHPLHPEHALQWACFVEERRLSLPSLMGLELREGAVLWHF

SEQ ID NO: 3772 - protein, 510 aa, Homo sapiens [sequence omitted]

SEQ ID NO: 3773 - protein, 41 aa, Homo sapiens
MLLLSLSVCSLSPIVQSALRAHQDLEEGPVSVKGLQLTLRT

SEQ ID NO: 3774 - protein, 122 aa, Homo sapiens [sequence omitted]

SEQ ID NO: 3775 - protein, 57 aa, Homo sapiens
MLLFILLTLSSGCRLLVSSWKTFLPHFSLPGPREHPEGSRTWFFRYWEPGAHCLHCA

SEQ ID NO: 3776 - protein, 259 aa, Homo sapiens
  SITE (229): Xaa equals any amino acid
MARIPKTLKFVVVIVAVLLPVLAYSATTARQEEVPQQTVAPQQQRHSFKGEECPAGSHRSEHTGACNPCTEGVDYTNASNNEPSCFPCTVCKSDQKHKSSCTMTRDTVCQCKEGTFRNENSPEMCRKCSRCPSGEVQVSNCTSWDDIQCVEEFGANATVETPAAEETMNTSPGTPAPAAEETMNTSPGTPAPAAEETMTTSPGTPAPAAEETMTTSPGTPAPAAEETMXTSPGTPASSHYLSCTIVGIIVLIVLLIVFV

SEQ ID NO: 3777 - protein, 249 aa, Homo sapiens
  SITE (113): Xaa equals any amino acid
  SITE (120): Xaa equals any amino acid
  SITE (160): Xaa equals any amino acid
MWKNHISSRNTTPLPRPPPGLTNPKPSSPWSSTAPRSVRGWGTQDSRLASASTWSDGGSVRPSYWLVLHNLTPQIDGSTLRTICMQHGPLLTFHLNLTQGTALIRYSTKQEAXKAQTALXMCVLGNTTILAEFATDDEVSRFLAQAQPPTPAATPSAPLXGWQSLETGQNQSDPVGPALNLFGGSTGLGQWSSSAGGSSGADLAGASLWGPPNYSSSLWGVPTVEDPHRMGSPAPLLPGDLLGGGSDSI

SEQ ID NO: 3778 - protein, 41 aa, Homo sapiens
KACSKEGWVFFVSLFLLLLLFLFCFVFADITGTVGKVSIRI

SEQ ID NO: 3779 - protein, 85 aa, Homo sapiens [sequence omitted]

SEQ ID NO: 3780 - protein, 29 aa, Homo sapiens
MKKHKVLAPCGHILVLCVLWTLLSLFTQH

SEQ ID NO: 3781 - protein, 106 aa, Homo sapiens [sequence omitted]

SEQ ID NO: 3782 - protein, 160 aa, Homo sapiens
MLSTRLTLLLMVATPALMGVGTLMGSGLRKLSRQCQEQIARAMGVADEALGNVRTVRAFAMEQREEERYGAELEACRCRAEELGRGIALFQGLSNIAFNCMVLGTLFIGGSLVAGQQLTGGDLMSFLVASQTVQSFLRVAPCPNSLPLQAVTLHAWKDHP

SEQ ID NO: 3783 - protein, 45 aa, Homo sapiens
MGLILSCALCGKELLWFSFFVLVEACAGDISSKHKPLKCLWFAWL

SEQ ID NO: 3784 - protein, 191 aa, Homo sapiens
  SITE (146): Xaa equals any amino acid
  SITE (156): Xaa equals any amino acid
  SITE (157): Xaa equals any amino acid
  SITE (158): Xaa equals any amino acid
  SITE (159): Xaa equals any amino acid
  SITE (169): Xaa equals any amino acid
  SITE (170): Xaa equals any amino acid
  SITE (173): Xaa equals any amino acid
  SITE (176): Xaa equals any amino acid
  SITE (184): Xaa equals any amino acid
  SITE (186): Xaa equals any amino acid
MICLVLTIFANLFPAACTGAHERTFLAVKPDGVQRRLVGEIVRRFERKGFKLVALKLVQASEELLREHYAELRERPFYGRLVKYMASGPVVAMVWQGLDVVRTSRALIGATNPADAPPGTIRGDFCIEVGKNLIHGSDSVESARRXIVSGSAQTSXXXXRTALGTGCMXXPAXARXRGLTLQPXPXGPKVG

SEQ ID NO: 3785 - protein, 107 aa, Homo sapiens
GPQVMSVWPLLPSPSCTSRQRQCWESVGCVSSPSWPWAEMSTRLHSSWLPAQPPSAATCSGASPMLPASQRLCRLRACFATRSVWMPVPRPPPPASQHPLLSLWHGV

SEQ ID NO: 3786 - protein, 227 aa, Homo sapiens
MNIKGSPWKGSLLLLLVSNLLLCQSVAPLPICPGGAARCQVTLRDLFDRAVVLSHYIHNLSSEMFSEFDKRYTHGRGFITKAINSCHTSSLATPEDKEQAQQMNQKDFLSLIVSILRSWNEPLYHLVTEVRGMQEAPEAILSKAVEIEEQTKRLLEGMELIVSQVHPETKENEIYPVWSGLPSLQMADEESRLSAYYNLLHCLRRDSHKIDNYLKLLKCRIIHNNNC

SEQ ID NO: 3787 - protein, 110 aa, Homo sapiens
MLRLLLLVAFALVVVLFHVLLAPITALFHTHFYDRLQDAGSRWPELYLYSRADEVVLARDIERMVEARLARRVLARSVDFVSSAHVSHLRDYPTYYTSLCVDFMRNCVRC

SEQ ID NO: 3788 - protein, 93 aa, Homo sapiens
MHEVFSQLAPFEVRLLLLSVWGFLREHGPLPQKFIFQSERGRFIRDFSREGGGEGGPHLAVLHSVLHRNIDRLGLFSGRFQAPSPSTLLRQGT

SEQ ID NO: 3789 - protein, 60 aa, Homo sapiens
  SITE (50): Xaa equals any amino acid
MKVLYLFCFVFVLFEALLCCPGWECSGHNLLVHCNLRSPRFQAVLLASAXRVSWDLQGAR

SEQ ID NO: 3790 - protein, 24 aa, Homo sapiens
MAKPCLYPKYKNWPGIVLHACGPS

SEQ ID NO: 3791 - protein, 104 aa, Homo sapiens
MFTPEVGKVIMALMVMSCCGSLLGWQFTIAQVFKSSSDEGYFPKIFSRVTKVDAPVQGMLTIVIIQSGLALMTISPSLNSQFNVLVNLAVASSVSSRRLNRNGI

SEQ ID NO: 3792 - protein, 58 aa, Homo sapiens
MPLASLSHQPRFFCSCICTSLPEPLLPSSCGDVSVSEIVFIQVPLCSPLQRGCFHHPF

SEQ ID NO: 3793 - protein, 40 aa, Homo sapiens
MYVAYSLKSVVGLLYELLLSCFIPVVNALPKLQESGMFIF

SEQ ID NO: 3794 - protein, 90 aa, Homo sapiens
MDRRRMALRPGSRRPTAFFFHSRWLVPNLLAFFLGLSGAGPIHLPMPWPNGRRHRVLDPHTQLSTHEAPGRWKPVAPRRMKACPQVLLEW

SEQ ID NO: 3795 - protein, 328 aa, Homo sapiens
MFLLLGSLTLSDLLAGAAYAANILLSGPLTLKLSPALWFAREGGVFVALTASVLSLLAIALERSLTMARRGPAPVSSRGRTLAMAAAAWGVSLLLGLLPALGWNCLGRLDACSTVLPLYAKAYVLFCVLAFVGILAAICALYARIYCQVRANARRLPARPGTAGTTSTRARRKPRSLALLRTLSVVLLAFVACWGPLFLLLLLDVACPARTCPVLLQADPFLGLAMANSLLNPIIYTLTNRDLRHALLRLVCCGRHSCGRDPSGSQQSASAAEASGGLRRCLPPGLDGSFSGSERSSPQRDGLDTSGSTGSPGAPTAARTLVSEPAAD

SEQ ID NO: 3796 - protein, 11 aa, Homo sapiens
MPFLFYLLFRL

SEQ ID NO: 3797 - protein, 751 aa, Homo sapiens
MLPGLALLLLAAWTARALEVPTDGNAGLLAEPQIAMFCGRLNMHMNVQNGKWDSDPSGTKTCIDTKEGILQYCQEVYPELQITNVVEANQPVTIQNWCKRGRKQCKTHPHFVIPYRCLVGEFVSDALLVPDKCKFLHQERMDVCETHLHWHTVAKETCSEKSTNLHDYGMLLPCGIDKFRGVEFVCCPLAEESDNVDSADAEEDDSDVWWGGADTDYADGSEDKVVEVAEEEEVAEVEEEEADDDEDDEDGDEVEEEAEEPYEEATERTTSIATTTTTTTESVEEVVREVCSEQAETGPCRAMISRWYFDVTEGKCAPFFYGGCGGNRNNFDTEEYCMAVCGSAIPTTAASTPDAVDKYLETPGDENEHAHFQKAKERLEAKHRERMSQVMREWEEAERQAKNLPKADKKAVIQHFQEKVESLEQEAANERQQLVETHMARVEAMLNDRRRLALENYITALQAVPPRPRHVFNMLKKYVRAEQKDRQHTLKHFEHVRMVDPKKAAQIRSQVMTHLRVIYERMNQSLSLLYNVPAVAEEIQDEVDELLQKEQNYSDDVLANMISEPRISYGNDALMPSLTETKTTVELLPVNGEFSLDDLQPWHSFGADSVPANTENEVEPVDARPAADRGLTTRPGSGLTNIKTEEISEVKMDAEFRHDSGYEVHHQKLVFFAEDVGSNKGAIIGLMVGGVVIATVIVITLVMLKKKQYTSIHHGVVEVDAAVTPEERHLSKMQQNGYENPTYKFFEQMQN

SEQ ID NO: 3798 - protein, 249 aa, Homo sapiens
MTSILLTYVYFVLSLGPRIMANRKPFQLRGFMIVYNFSLVALSLYIVYEFLMSGWLSTYTWRCDPVDYSNSPEALRMVRVAWLFLFSKFIELMDTVIFILRKKDGQVTFLHVFHHSVLPWSWWWGVKIAPGGMGSFHAMINSSVHVIMYLYYGLSAFGPVAQPYLWWKKHMTAIQLIQFVLVSLHISQYYFMSSCNYQYPVIIHLIWMYGTIFFMLFSNFWYHSYTKGKRLPRALQQNGAPGIAKVKAN

SEQ ID NO: 3799 - protein, 159 aa, Homo sapiens
SKINEGIGDKIGMFFQSMATFFTGFIVGFTRGWKLTLVILAISPVLGLSAAVWAKILSSFTDKELLAYAKAGAVAEEVLAAIRTVIAFGGQKKELERYNKNLEEAKRIGIKKAITANISIGAAFLLIYASYALAFWYGTTLVLSGEYSIGQVLTVSFLY

SEQ ID NO: 3800 - protein, 12 aa, Homo sapiens
MIFFVLCIFSPT

SEQ ID NO: 3801 - protein, 12 aa, Homo sapiens
MQSLTCTACVCA

SEQ ID NO: 3802 - protein, 49 aa, Homo sapiens [sequence omitted]

SEQ ID NO: 3803 - protein, 117 aa, Homo sapiens
HASAHASGMVSISCPRDRPALASQNAGITGMSHCASPHFFYLFIYFFEMESCSVAQAGVQWRDLGSLQPLPLRFKRFSSLSLPSSWDSRCPPPHLANFFVFLVEMGFHHVGQVVSNS

SEQ ID NO: 3804 - protein, 381 aa, Homo sapiens [sequence omitted]

SEQ ID NO: 3805 - protein, 13 aa, Homo sapiens
MVLIPFPLCLLTA

SEQ ID NO: 3806 - protein, 646 aa, Homo sapiens
MPSPTPKDIEKETAKDEEEEPPSMTQLLRRRRAVLPQTRYVELFIVVDKERYDMMGRNQTAVREEMILLANYLDSMYIMLNIRIVLVGLEIWTNGNLINIVGGAGDVLGNFVQWREKFLITRRRHDSAQLVLKKGFGGTAGMAFVGTVCSRSHAGGINVFGQITVETFASIVAHELGHNLGMNHDDGRDCSCGAKSCIMNSGASGSRNFSSCSAEDFEKLTLNKGGNCLLNIPKPDEAYSAPSCGNKLVDAGEECDCGTPKECELDPCCEGSTCKLKSFAECAYGDCCKDCRFLPGGTLCRGKTSECDVPEYCNGSSQFCQPDVFIQNGYPCQNNKAYCYNGMCQYYDAQCQVIFGSKAKAAPKDCFIEVNSKGDRFGNCGFSGNEYKKCATGNALCGKLQCENVQEIPVFGIVPAIIQTPSRGTKCWGVDFQLGSDVPDPGMVNEGTKCGAGKICRNFQCVDASVLNYDCDVQKKCHGHGVCNSNKNCHCENGWAPPNCETKGYGGSVDSGPTYNEMNTALRDGLLVFFFLIVPLIVCAIFIFIKRDQLWRSYFRKKRSQTYESDGKNQANPSRQPGSVPRHVSPVTPPREVPIYANRFAVPTYAAKQPQQFPSRPPPPQPKVSSQGNLIPARPAPAPPLYSSLT

SEQ ID NO: 3807 - protein, 122 aa, Homo sapiens
  SITE (70): Xaa equals any amino acid
MKLLTGLVFCSLVLGVSSRSFFSFLGEAFDGARDMWRAYSDMREANYIGSDKYFHARGNYDAAKRGPGGXWAAEAISDARENIQRFFGHGAEDSLADQAANEWGRSGKDPNHFRPAGLPEKY

SEQ ID NO: 3808 - protein, 36 aa, Homo sapiens
MSQSVLWSFLGVSVACGPLRYCLVAFCAKLGASAVE

SEQ ID NO: 3809 - protein, 127 aa, Homo sapiens
MGTALQWMNLTCLGESLLLLLPCFLCSVGYFLVLWEDLVYLGRVFLSSPTLAPAFSVRLPSTQWRLGGYRLVLFLGYLVILLCYANPYTIIQNLFKDRLASPFLFCAPSNMSLGTKAAVGLFSLGRA

SEQ ID NO: 3810 - protein, 334 aa, Homo sapiens
MKMASSLAFLLLNFHVSLLLVQLLTPCSAQFSVLGPSGPILAMVGEDADLPCHLFPTMSAETMELKWVSSSLRQVVNVYADGKEVEDRQSAPYRGRTSILRDGITAGKAALRIHNVTASDSGKYLCYFQDGDFYEKALVELKVAALGSNLHVEVKGYEDGGIHLECRSTGWYPQPQIQWSNAKGENIPAVEAPVVADGVGLYEVAASVIMRGGSGEGVSCIIRNSLLGLEKTASISIADPFFRSAQPWIAALAGTLPILLLLLAGASYFLWRQQKEITALSSEIESEQEMKEMGYAATEREISLRESLQEELKRKKIQYLTRGEESSSDTNKSA

SEQ ID NO: 3811 - protein, 154 aa, Homo sapiens
MKVSAAALAVILIATALCAPASASPYSSDTTPCCFAYIARPLPRAHIKEYFYTSGKCSNPAVVHRSRMPKREGQQVWQDFLYDSRLNKGKLCHPKEPPSVCQPREEMGSGVHQLFGDELGWRVLEPELTQICLFLLALVLAWEASPHYPTPPAP

SEQ ID NO: 3812 - protein, 339 aa, Homo sapiens
MNWELLLWLLVLCALLLLLVQLLRFLRADGDLTLLWAEWQGRRPEWELTDMVVWVTGASSGIGEELAYQLSKLGVSLVLSARRVHELERVKRRCLENGNLKEKDILVLPLDLTDTGSHEAATKAVLQEFGRIDILVNNGGMSQRSLCMDTSLDVYRKLIELNYLGTVSLTKCVLPHMIERKQGKIVTVNSILGIISVPLSIGYCASKHALRGFFNGLRTELATYPGIIVSNICPGPVQSNIVENSLAGEVTKTIGNNGDQSHKMTTSRCVRLMLISMANDLKEVWISEQPFLLVTYLWQYMPTWAWWITNKMGKKRIENFKSGVDADSSYFKIFKTKHD

SEQ ID NO: 3813 - protein, 339 aa, Homo sapiens; identical to SEQ ID NO: 3812

SEQ ID NO: 3814 - protein, 223 aa, Homo sapiens
MSPPLLLLPLLLLLPLLNVEPAGATLIRIPLRQVHPGRRTLNLLRGWGKPAELPKLGAPSPGDKPASVPLSKFLDAQYFGEIGLGTPPQNFTVAFDTGSSNLWVPSRRCHFFSVPCCELLCGRIRLNGGEGRRRGWASASQRFLRNCSFLTPSKVRRLKGQKAFGKLPSHSDTSLTSDLGFHHRFNPNASSSFKPSGTKFAIQYGTGRVDGILSEDKLTVSGL

SEQ ID NO: 3815 - protein, 4 aa, Homo sapiens
MVTL

SEQ ID NO: 3816 - protein, 291 aa, Homo sapiens
MEPRTRGKYGEGAKQETFTFALTLVFIQCVINAVFAKILIQFFDTARVDRTRSWLYAACSISYLGAMVSSNSALQFVNYPTQVLGKSCKPIPVMLLGVTLLKKKYPLAKYLCVLLIVAGVALFMYKPKKVVGIEEHTVGYGELLLLLSLTLDGLTGVSQDHMRAHYQTGSNHMMLNINLWSTLLLGMGILFTGELWEFLSFAERYPAIIYNILLFGLTSALGQSFIFMTVVYFGPLTCSIITTTRKFFTILASVILFANPISPMQWVGTVLVFLGLGLDAKFGKGAKKTSH

SEQ ID NO: 3817 - protein, 134 aa, Homo sapiens
  SITE (118): Xaa equals any amino acid
  SITE (128): Xaa equals any amino acid
  SITE (134): Xaa equals any amino acid
MALLFICLFVCLFFETGSRSVAQAGVQWGHVGSLQLPSHGFEQFSCLSLLGSWDCGRPLPRPANFFVFLVETGFHHVGQAGLELLTSGDPPASASQSAGITGVSHRAWPEWHFQDHIXYLFISGNIPXSDIYFX

SEQ ID NO: 3818 - protein, 146 aa, Homo sapiens
MTMRSLLRTPFLCGLLWAFCAPGARAEEPAASFSQPGSMGLDKNTVHDQEHIMEHLEGVINKPEAEMSPQELQLHYFKMHDYDGNNLLDGLELSTAITHVHKEEGSEQAPLMSEDELINIIDGVLRDDDKNNDGYIDYAEFAKSLQ

SEQ ID NO: 3819 - protein, 42 aa, Homo sapiens
MLFVKPPFQKKFMLLLPLLITSCDSHWPNQISVGLLGIQSLP

SEQ ID NO: 3820 - protein, 259 aa, Homo sapiens
  SITE (200): Xaa equals any amino acid
MSLSFLLLLFFSHLILSAWAHGEKRLAPKGQPGPAATDRNPRGSSSRQSSSSAMSSSSASSSPAASLGSQGSGLEQSSFQWSPSGRRTGSLYCRVGIGFHLQIYPDGKVNGSHEANMLSVLEIFAVSQGIVGIRGVFSNKFLAMSKKGKLHASAKFTDDCKFRERFQENSYNTYASAIHRTEKTGREWYVALNKRGKAKXGCSPRVKPQHISTHFLPRFQAVGAARTFFSRLLFLKRKSHLALSSQRFPFLHLGKIPTQ

SEQ ID NO: 3821 - protein, 380 aa, Homo sapiens
MAFVCLAIGCLYTFLISTTFGCTSSSDTEIKVNPPQDFEIVDPGYLGYLYLQWQPPLSLDHFKECTVEYELKYRNIGSETWKTIITKNLHYKDGFDLNKGIEAKIHTLLPWQCTNGSEVQSSWAETTYWISPQGIPETKVQDMDCVYYNWQYLLCSWKPGIGVLLDTNYNLFYWYEGLDHALQCVDYIKADGQNIGCRFPYLEASDYKDFYICVNGSSENKPIRSSYFTFQLQNIVKPLPPVYLTFTRESSCEIKLKWSIPLGPIPARCFDYEIEIREDDTTLVTATVENETYTLKTTNETRQLCFVVRSKVNIYCSDDGIWSEWSDKQCWEGEDLSKKTLLRFWLPFGFILILVIFVTGLLLRKPNTYPKMIPEFFCDT

SEQ ID NO: 3822 - protein, 18 aa, Homo sapiens
LLLLIFMVRYFILLINGH

SEQ ID NO: 3823 - protein, 47 aa, Homo sapiens
MLVCSLEFVSFLLQLWFSLLAKLISNISSSTKSSLTPRVFNLSFLCT

SEQ ID NO: 3824 - protein, 16 aa, Homo sapiens
GEVTFYACSYHLYFCY

SEQ ID NO: 3825 - protein, 27 aa, Homo sapiens
MGGLFLQVLILLPVGVVAAGKQVLLTF

SEQ ID NO: 3826 - protein, 109 aa, Homo sapiens
  SITE (2): Xaa equals any amino acid
  SITE (9): Xaa equals any amino acid
  SITE (16): Xaa equals any amino acid
TXAGRNAGXCCQLNGXLYVVGGDDGSCNLASVEYYNPVTDKWTLLPTNMSHGAELCRCCRDSQVLVTQTPTARRWRKEQVLPVTLNSRTLVTGFNLLGRVCAAVRTALL

SEQ ID NO: 3827 - protein, 52 aa, Homo sapiens
MLPLPLLALTSLSPLTQSLSLKAIPHVSTSMACGSLEQGSPTPGPWTTTVAC

SEQ ID NO: 3828 - protein, 59 aa, Homo sapiens
MMEKLKCGILWLLWTPVLLQGHSVYGPLWSIPEEFFDYSLMNSRLSVVHMMTQSSSGTS

SEQ ID NO: 3829 - protein, 42 aa, Homo sapiens
MCRRFFFLFFLFLPFFLCLKSEGLLCIDCTRTCRSSVFTHHR

SEQ ID NO: 3830 - protein, 34 aa, Homo sapiens
  SITE (25): Xaa equals any amino acid
MPSHILTLPVFTLFWSFGSIGWSSXQNGSWDSPM

SEQ ID NO: 3831 - protein, 51 aa, Homo sapiens
MQWCSLASLQPLPSGFKLFSCLSLPSSWDYQHLPSHLANFCIFSRDEVSPC

SEQ ID NO: 3832 - protein, 78 aa, Homo sapiens
MPEYMMALLVAMFHSGCRGIAKKQIRFPGSCDLNKRGRWLLCSIKMCVFIWLITVEASLLFFFLSCLSHSLRTHANFV

SEQ ID NO: 3833 - protein, 96 aa, Homo sapiens
MRMAVIGGAIFLLAGLAILVATAWYGNRIVQEFYDPMTPVNARYEFGQALFTGWAAASLCLLGGALLCCSCPRKTTSYPTPRPYPKPAPSSGKDYV

SEQ ID NO: 3834 - protein, 302 aa, Homo sapiens
MCAERLGQFMTLALVLATFDPARGTDATNPPEGPQDRSSQQKGRLSLQNTAEIQHCLVNAGDVGCGVFECFENNSCEIRGLHGICMTFLHNAGKFDAQGKSFIKDALKCKAHALRHRFGCISRKCPAIREMVSQLQRECYLKHDLCAAAQENTRVIVEMIHFKDLLLHEPYVDLVNLLLTCGEEVKEAITHSVQVQCEQNWGSLCSILSFCTSAIQKPPTAPPERQPQVDRTKLSRAHHGEAGHHLPEPSSRETGRGAKGERGSKSHPNAHARGRVGGLGAQGPSGSSEWEDEQSEYSDIRR

SEQ ID NO: 3835 - protein, 131 aa, Homo sapiens
MKTLQSTLLLLLLVPLIKPAPPTQQDSRIIYDYGTDNFEESIFSQDYEDKYLDGKNIKEKETVIIPNEKSLQLQKDEAITPLPPKKENDEMPTCLLCVCLSGSVYCEEVDIDAVPPLPKESAYLYARFNKN

SEQ ID NO: 3836 - protein, 195 aa, Homo sapiens
MDNRFATAFVIACVLSLISTIYMAASIGTDFWYEYRSPVQENSSDLNKSIWDEFISDEADEKTYNDALFRYNGTVGLWRRCITIPKNMHWYSPPERTESFDVVTKCVSFTLTEQFMEKFVDPGNHNSGIDLLRTYLWRCQFLLPFVSLGLMCFGALIGLCACICRSLYPTIATGILHLLAGLCTLGSVMLLCCWN

SEQ ID NO: 3837 - protein, 38 aa, Homo sapiens
MSLLLLPLFLSSLDCARRQCPYSHTLSAFLWAGTWKGC

SEQ ID NO: 3838 - protein, 185 aa, Homo sapiens
  SITE (7): Xaa equals any amino acid
MAGPRPXWRDQLLFMSIIVLVIVVICLMLYALLWEAGNLTDLPNLRIGFYNFCLWNEDTSTLQCHQFPELEALGVPRVGLGLARLGVYGSLVLTLFAPQPLLLAQCNSDERAWRLAVGFLAVSSVLLAGGLGLFLSYVWKWVRLSLPGPGFLALGSAQALLILLLIAMAVFPLRAERAESKLESC

SEQ ID NO: 3839 - protein, 268 aa, Homo sapiens
  SITE (245): Xaa equals any amino acid
  SITE (248): Xaa equals any amino acid
MGSRAELCTLLGGFSFLLLLIPGEGAKGGSLRESQGVCSKQTLVVPLHYNESYSQPVYKPYLTLCAGRRICSTYRTMYRVMWREVRREVQQTHAVCCQGWKKRHPGALTCEAICAKPCLNGGVCVRPDQCECAPGWGGKHCHVDVDECRTSITLCSHHCFNTAGSFTCGCPHDLVLGVDGRTCMEGSPEPPTSASILSVAVREAEKDERALKQEIHELRGRLERLEQVSQACWVGRGQTSLSIPXGIXSFLVGRSGWGLGQSGAARAA

SEQ ID NO: 3840 - protein, 208 aa, Homo sapiens [sequence omitted]

SEQ ID NO: 3841 - protein, 49 aa, Homo sapiens
MPLLLFLWGWGWGPGAVADPFHAASPSAPRSEDAPSLPCCLHSFLTKQR

SEQ ID NO: 3842 - protein, 113 aa, Homo sapiens
MFKKILFPLVALFMLAGCAKPPTTIEVSPTITLPQQDPSLMGVTVSINGADQRTDQALAKVTRDNQIVTLTASRDLRFLLQEVLEKQMTARGYMVGPNGPVNLQIIVSQLYAD

SEQ ID NO: 3843 - protein, 194 aa, Homo sapiens
MTMRHNWTPDLSPLWVLLLCAHVVTLLVRATPVSQTTTAATASVRSTKDPCPSQPPVFPAAKQCPALEVTWPEVEVPLNGTLSLSCVACSRFPNFSILYWLGNGSFIEHLPGRLWEGSTSRERGSTGTQLCKALVLEQLTPALHSTNFSCVLVDPEQVVQRHVVLAQLWAGLRATLPPTQEALPSSHSSPQQQG

SEQ ID NO: 3844 - protein, 104 aa, Homo sapiens
MPPNPHLTLILITALWEAVVGGSLEPRRLRLECCTIAPLHSTAWATEGDPVSKKRETAVAIIVVRNNTERSLVPSAQLFLTVSLCRTPQSHTRTWTLMPSGGLT

SEQ ID NO: 3845 - protein, 75 aa, Homo sapiens
MMLNLFFMCLFAICLSSLEKFLSFKSCLFLIGVFAFLLNSSYVVDTSPLSDIQFENIFSNSVCCLFTLKHKNFSF

SEQ ID NO: 3846 - protein, 22 aa, Homo sapiens
MLLKDICLLWVATLSPPDVLAT

SEQ ID NO: 3847 - protein, 80 aa, Homo sapiens
  SITE (41): Xaa equals any amino acid
  SITE (75): Xaa equals any amino acid
MEKMWLVYLPLSSTLSTTTGGSIVSISTSPHSWDPGTTPEXRLGPQSLSQSGFELPSRKCVAYSIEWLSNASWQXPDPQK

SEQ ID NO: 3848 - protein, 249 aa, Homo sapiens
  SITE (229): Xaa equals any amino acid
  SITE (236): Xaa equals any amino acid
MLQLWKLVLLCGVLTGTSESLLDNLGNDLSNVVDKLEPVLHEGLETVDNTLKGILEKLKVDLGVLQKSSAWQLAKQKAQEAEKLLNNVISKLLPTNTDIFGLKISNSLILDVKAEPIDDGKGLNLSFPVTANVTVAGPIIGQIINLKASLDLLTAVTIETDPQTHQPVAVLGECASDPTSISLSLLDKHSQIINKFVNSVINTLKSTVSSLLQKEICPLIRIFIHSLDXNVIQQVXDNPQHKTQLQTLI

SEQ ID NO: 3849 - protein, 65 aa, Homo sapiens
MVIKVLLAPWVLLVLGALLVLLALLEKMVALDILVQLDLLAFEALRVTKALLAPLVPLALLDLQV

SEQ ID NO: 3850 - protein, 82 aa, Homo sapiens
MKFIVSTCLRFLLFWGFGGAFCFVFAKCNMKADAAALVCYADLVKKNFLHILLAFDASVKFFSKAFVQLYGKNMVINLKSLH

SEQ ID NO: 3851 - protein, 28 aa, Homo sapiens
MQAPEPRRPVVLASGCPGLLSLRLALFY

SEQ ID NO: 3852 - protein, 356 aa, Homo sapiens
MSARWLFSSGLLLVGLVNIFFAWSSTVPVFAALWFLNGLAQGLGWPPCGKVLRKWFEPSQFGTWWAILSTSMNLAGGLGPILATILAQSYSWRSTLALSGALCVVVSFLCLLLIHNEPADVGLRNLDPMPSEGKKGSLKEESTLQELLLSPYLWVLSTGYLVVFGVKTCCTDWGQFFLIQEKGQSALVGSSYMSALEVGGLVGSIAAGYLSDRAMAKAGLSNYGNPRHGLLLFMMAGMTVSMYLFRVTVTSDSPKLWILVLGAVFGFSSYGPIALFGVIANESAPPNLCGTSHAIVGLMANVGGFLAGLPFSTIAKHYSWSTAFWVAEVICAASTAAFFLLRNIRTKMGRVSKKAE

SEQ ID NO: 3853 - protein, 509 aa, Homo sapiens
MSPWLLLLLVVGSWLLARILAWTYAFYNNCRRLQCFPQPPKRNWFWGHLGLITPTEEGLKDSTQMSATYSQGFTVWLGPIIPFIVLCHPDTIRSITNASAAIAPKDNLFIRFLKPWLGEGILLSGGDKWSRHRRMLTPAFHFNILKSYITIFNKSANIMLDKWQHLASEGSSCLDMFEHISLMTLDSLQKCIFSFDSHCQERPSEYIATILELSALVEKRSQHILQHMDFLYYLSHDGRRFHRACRLVHDFTDAVIRERRRTLPTQGIDDFFKDKAKSKTLDFIDVLLLSKDEDGKALSDEDIRAEADTFMFGGHDTTASGLSWVLYNLARHPEYQERCRQEVQELLKDRDPKEIEWDDLAQLPFLTMCVKESLRLHPPAPFISRCCTQDIVLPDGRVIPKGITCLIDIIGVHHNPTVWPDPEVYDPFRFDPENSKGRSPLAFIPFSAGPRNCIGQAFAMAEMKVVLALMLLHFRFLPDHTEPRRKLELIMRAEGGLWLRVEPLNVSLQ

SEQ ID NO: 3854 - protein, 7 aa, Homo sapiens
SCLSCWL

SEQ ID NO: 3855 - protein, 711 aa, Homo sapiens
  SITE (334): Xaa equals any amino acid
  SITE (485): Xaa equals any amino acid
  SITE (499): Xaa equals any amino acid
MNNAGDKWSAFLKEQSTLAQMYPLQEIQNLTVKLQLQALQQNGSSVLSEDKSKRLNTILNTMSTIYSTGKVCNPDNPQECLLLEPGLNEIMANSLDYNERLWAWESWRSEVGKQLRPLYEEYVVLKNEMARANHYEDYGDYWRGDYEVNGVDGYDYSRGQLIEDVEHTFEEIKPLYEHLHAYVRPKLMNAYPSYISPIGCLPAHLLGDMWGRFWTNLYSLTVPFGQKPNIDVTDAMVDQAWDAQRIFKEAEKFFVSVGLPNMTQGFWENSMLTDPGNVQKAVCHPTAWDLGKGDFRILMCTKVTMDDFLTAHHEMGHIQYDMAYAAQPFLLRNXANEGFHEAVGEIMSLSAATPKHLKSIGLLSPDFQEDNETEINFLLKQALTIVGTLPFTYMLEKWRWMVFKGEIPKDQWMKKWWEMKREIVGVVEPVPHDETYCDPASLFHVSNDYSFIRYYTRTLYQFQFQEALCQAAKHEGPLHKCDISXSTEAGQKLFNMLRXGKSEPWTLALENVVGAKNMNVRPLLNYFEPLFTWLKDQNKNSFVGWSTDWSPYADQSIKVRISLKSALGDKAYEWNDNEMYLFRSSVAYAMRQYFLKVKNQMILFGEEDVRVANLKPRISFNFFVTAPKNVSDIIPRTEVEKAIRMSRSRINDAFRLNDDSLEFLGIQPTLGPPNQPPVSIWLIVFGVVMGVIVVGIVILIFTGIRDRKKGL

SEQ ID NO: 3856 - protein, 233 aa, Homo sapiens [sequence omitted]

SEQ ID NO: 3857 - protein, 575 aa, Homo sapiens
MTSKKLVNSVAGCADDALAGLVACNPNLQLLQGHRVALRSDLDSLKGRVALLSGGGSGHEPAHAGFIGKGMLTGVIAGAVFTSPAVGSILAAIRAVAQAGTVGTLLIVKNYTGDRLNFGLAREQARAEGIPVEMVVIGDDSAFTVLKKAGRRGLCGTVLIHKVAGALAEAGVGLEEIAKQVNVVTKAMGTLGVSLSSCSVPGSKPTFELSADEVELGLGIHGEAGVRRIKMATADEIVKLMLDHMTNTTNASHVPVQPGSSVVMMVNNLGGLSFLELGIIADATVRSLEGRGVKIARALVGTFMSALEMPGISLTLLLVDEPLLKLIDAETTAAAWPNVAAVSITGRKRSRVAPAEPQEAPDSTAAGGSASKRMALVLERVCSTLLGLEEHLNALDRAAGDGDCGTTHSRAARAIQEWLKEGPPPASPAQLLSKLSVLLLEKMGGSSGALYGLFLTAAAQPLKAKTSLPAWSAAMDAGLEAMQKYGKAAPGDRTMLDSLWAAGQELQAWKSPGADLLQVLTKAVKSAEAAAEATKNMEAGAGRASYISSARLEQPDPGAVAAAAILRAILEVLQS

SEQ ID NO: 3858 - protein, 356 aa, Homo sapiens; identical to SEQ ID NO: 3852

SEQ ID NO: 3859 - protein, 65 aa, Homo sapiens
MCKLMYFLFLLRIYFDLLAGSFVHFSSILLFIAFCAVLTVQLWDCLVLCLMCGKIYSYCLIVFRR

SEQ ID NO: 3860 - protein, 50 aa, Homo sapiens
MLYKLPQTFLYCFFVLSCFCFCFCFCFCFSLVSPGKMGNFTVGKSKPKLF

SEQ ID NO: 3861 - protein, 178 aa, Homo sapiens [sequence omitted]

SEQ ID NO: 3862 - protein, 21 aa, Homo sapiens
MFLTSTIGLCCLTPWVFAHFP

SEQ ID NO: 3863 - protein, 114 aa, Homo sapiens [sequence omitted]

SEQ ID NO: 3864 - protein, 266 aa, Homo sapiens
MWWFQQGLSFLPSALVIWTSAAFIFSYITAVTLHHIDPALPYISDTGTVAPEKCLFGAMLNIAAVLCIATIYVRYKQVHALSPEENVIIKLNKAGLVLGILSCLGLSIVANFQKTTLFAAHVSGAVLTFGMGSLYMFVQTILSYQMQPKIHGKQVFWIRLLLVIWCGVSALSMLTCSSVLHSGNFGTDLEQKLHWNPEDKGYVLHMITTAAEWSMSFSFFGFFLTYIRDFQKISLRVEANLHGLTLYDTAPCPINNERTRLLSRDI

SEQ ID NO: 3865 - protein, 256 aa, Homo sapiens
MKLGRAVLGLLLLAPSVVQAVEPISLGLALAGVLTGYIYPRLYCLFAECCGQKRSLSREALQKDLDDNLFGQHLAKKIILNAVFGFINNPKPKKPLTLSLHGWTGTGKNFVSKIIAENIYEGGLNSDYVHLFVATLHFPHASNITLYKDQLQLWIRGNVSACARSIFIFDEMDKMHAGLIDAIKPFLDYYDLVDGVSYQKAMFIFLSNAGAERITDVALDFWRSGKQREDIKLKDIEHALSVSVFNNKNSGSGTAA

SEQ ID NO: 3866 - protein, 48 aa, Homo sapiens
MRLMPWMWWSSLPSTAWASSPRTSSSTPGPSAASLPRGQPCPTQMLVP

SEQ ID NO: 3867 - protein, 143 aa, Homo sapiens
MTLVGMVVYTFTLNLGHLWVVFITAGTMGFFMTGYLPLGFEFAVELTYPESEGISSGLLNISAQVFGIIFTISQGQIIDNYGTKPGNIFLCVFLTLGAALTAFIKADLRRQKANKETLENKLQEEEEESNTSKVPTAVSEDHL

SEQ ID NO: 3868 - protein, 237 aa, Homo sapiens [sequence omitted]

SEQ ID NO: 3869 - protein, 89 aa, Homo sapiens; identical to SEQ ID NO: 3687

SEQ ID NO: 3870 - protein, 52 aa, Homo sapiens
MNELLLFFFFFFFFTFCIETNSFKQTYYYYFLQNIYMEMLPPPVNPPVPPWG

SEQ ID NO: 3871 - protein, 55 aa, Homo sapiens
MSLVTYVFELSSCYRCLMILLLLAYLYFTCFSLNQHGYTLFQQLYKLNTNYYYCY

SEQ ID NO: 3872 - protein, 194 aa, Homo sapiens
  SITE (182): Xaa equals any amino acid
  SITE (190): Xaa equals any amino acid
  SITE (194): Xaa equals any amino acid
MLKHIRHNPGGLCSCVSLSSSVPIRAGPPSGTATSELPPPFWSVGFVTVQHLFDDFLNYGGCRIEASFPPILECGYDFGLGAVGSGGLHVHTLDVLGVNSLQGLQALAAQFSGHGRSCCAPASGYQEQEQQCHSQEPGIAGGGGESSAGHGAQQAGLAAVRGAEELARRCLRPGLCPLLSSXRKGRPGNXGPQX

SEQ ID NO: 3873 - protein, 109 aa, Homo sapiens; identical to SEQ ID NO: 3340

SEQ ID NO: 3874 - protein, 13 aa, Homo sapiens
MCWRLPSRAACCC

SEQ ID NO: 3875 - protein, 110 aa, Homo sapiens
MALVRALVCCLLTAWHCRSGLGLPVAPAGGRNPPPAIGQFWHVTDLHLDPTYHITDDHTKVCASSKGANASNPGPFGDVLCDSPYQLILSAFDFIKNSGQEASFMIWTGG

SEQ ID NO: 3876 - protein, 493 aa, Homo sapiens
MGMVSVGFLLFILFTSNPFSRTLPNFPIEGRDLNPLLQDPGLIFHPPLLYMGYVGFSVAFAFAIASLLSGRLDSTYARFTRPWTLAAWIFLTLGIVLGSAWAYYELGWGGWWFWDPVENASFMPWLVGTALMHSLAVTEQRASFKAWTLLLAISAFSLCLLGTFLVRSGVLVSVHAFASDPARGMFILAFMVLVIGGSLLLFAARGHKVRSRVNNALWSRESLLLANNVLLVAAMLVVLLGTLLPLVHKQLGLGSISIGEPFFNTMFTWLMVPFALLLGVGPLVRWGRDRPRKIRNLLIIAFISTLVLSLLLPWLFESKVVAMTVLGLAMACWIAVLAIAEAALRISRGTKTTFSYWGMVAAHLGLAVTIVGIAFSQNYSVERDVRMKSGDSVDIHEYRFTFRDVKEVTGPNWRGGVATIGVTRDGKPETVLYAEKRYYNTAGSMMTEAAIDGGITRDLYAALGEELENGAWAVRLYYKPFVRWIWAGGLMMA

SEQ ID NO: 3877 - protein, 226 aa, Homo sapiens
RYCRLGAINAFNMVDGIDGLLGGLSCVSFAAIGMILWFDGQTSLAIWCFAMIAAILPYIMLNLGILGRRYKVFMGDAGSTLIGFTVIWILLETTQGKTHPISPVTALWIIAIPLMDMVAIMYRRLRKGMSPFSPDRQHIHHLIMRAGFTSRQAFVLITLAAALLASIGVLAEYSHFVPEWVMLVLFLLAFFLYGYCIKRAWKVARFIKRVKRRLRRNRGGSPNLTK

SEQ ID NO: 3878 - protein, 215 aa, Homo sapiens
MAQGDDIKRDYKKSTLIADARLGADREWHAIHRLSDVGVDTMKGIGFGEKGLNPLTRASFIITEDLTPTISLEDYCADWAVNPPDIRVKRMLIARVATMVRKMHTAGINHRDCYICHFLLHLPFTGREDELKISVIDLHRAQIRAKVPRRWRDKDLIGLYFSSMNIGLTQRDIWRFMKVYFGMPLRKILSLEQNLLNMASVKAERIKERTQRKGL

SEQ ID NO: 3879 - protein, 246 aa, Homo sapiens
  SITE (186): Xaa equals any amino acid
  SITE (226): Xaa equals any amino acid
  SITE (236): Xaa equals any amino acid
MLINRNIVALFALPFMASATASELSIGAGAAYNESPYRGYNENTKAIPLISYEGDTFYVRQTTLGFILSQSEKNELSLTASWMPLEFDPTDNDDYAMQQLDKRDSTAMAGVAWYHHERWGTVKASAAADVLDNSNGWVGELSVFHKMQIGRLSLTPALGVLYYDENFSDYYYGISESESRRSGLAXYSAQDAWVPYVSLTAKYPIGEHVVLMASAGYSELPEEITXSPMIDRNESXTFVTGVSWRF

SEQ ID NO: 3880 - protein, 44 aa, Homo sapiens
ETPGVGAESHNCVICLLSFFVVWFFCLFVYTNKNEPECWWFLKS

SEQ ID NO: 3881 - protein, 672 aa, Homo sapiens; identical to SEQ ID NO: 3105

SEQ ID NO: 3882 - protein, 672 aa, Homo sapiens; identical to SEQ ID NO: 3105

SEQ ID NO: 3883 - protein, 11 aa, Homo sapiens
QGIFLLLVFCT

SEQ ID NO: 3884 - protein, 138 aa, Homo sapiens
MKFTTLLFLAAVAGALVYAEDASSDSTGADPAQEAGTSKPNEEISGPAEPASPPETTTTAQETSAAAVQGTAKVTSSRQELNPLKSIVEKSILLTEQALAKAGKGMHGGVPGGKQFIENGSEFAQKLLKKFSLLKPWA

SEQ ID NO: 3885 - protein, 107 aa, Homo sapiens
ECFIVLGRKTSYLSKAFRRNFKGQLTWHSNDKELFPGCLFVIVAVNLRSLSNLPQNEFRSRGIFGSTKREWNFFLFCSFKTSENSNVGLLCVMSNKNRDFSIQKKKK

SEQ ID NO: 3886 - protein, 63 aa, Homo sapiens
MAFLWCSRPQRCSLSRPRCFQSDTWRWQKYWEPTPALPGSKMQGWCWQTRSGNSYSIWMLMMA

SEQ ID NO: 3887 - protein, 37 aa, Homo sapiens
MSTKLVVLVLFLLAEWRLVFSNPVWWSPLLQSTLQRK

SEQ ID NO: 3888 - protein, 236 aa, Homo sapiens
MPTDMEHTGHYLHLAFLMTTVFSLSPGTKANYTRLWANSTSSWDSVIQNKTGRNQNENINTNPITPEVDYKGNSTNMPETSHIVALTSKSEQELYIPSVVSNSPSTVQSIENTSKSHGEIFKKDVCAENNNNMAMLICLIIIAVLFLICTFLFLSTVVLANKVSSLRRSKQVGKRQPRSNGDFLASGLWPAESDTWKRTKQLTGPNLVMQSTGVLTATRERKDEEGTEKLTNKQIG

SEQ ID NO: 3889 - protein, 193 aa, Homo sapiens
MLPFPIFLVLLLRGLVLWTPASSGTIMPEERKTEIERETETESETVIGTEKENAPERERGSVITVLHQVFSTAMKNDTDTGNMQKEVMSVTEQVEKKKNDIEKDDTGRKRKPDISLLEVIVDVAMKVKKEIVTGDTNTKNLKEAKKEKKRAVSLPLNRRAPKLHLQNRHGFGLLCILVPEVDTINLVIFLDNV

SEQ ID NO: 3890 - protein, 39 aa, Homo sapiens
MWVSIVLIFSAFKIRVLCNLVFLIIYVILKAQNITLKLL

SEQ ID NO: 3891 - protein, 38 aa, Homo sapiens
MVFLVLSSFSSAYSFAKFFGLTSISDKGRKDLSAMLKE

SEQ ID NO: 3892 - protein, 100 aa, Homo sapiens [sequence omitted]

SEQ ID NO: 3893 - protein, 80 aa, Homo sapiens
MKIGISVKLLLSVFLILGLPMKFSMTKGSSTNPRVWTVDLQVEKMKFIMFMIKPGEVVKIWPRVFIGPVKIWTRTCMVMT

SEQ ID NO: 3894 - protein, 138 aa, Homo sapiens
MPGPRVWGKYLWRSPHSKGCPGAMWWLLLWGVLQACPTRGSVLLAQELPQQLTSPGYPEPYGKGQESSTDIKAPEGFAVRLVFQDFDLEPSQDCAGDSVTVSWGWGGSRQDCGQGDSRGCGKWRCPESPIWRRDEFSM

SEQ ID NO: 3895 - protein, 211 aa, Homo sapiens
MAVVPLLLLGGLWSAVGASSLGVVTCGSVVKLLNTRHNVRLHSHDVRYGSGSGQQSVTGVTSVDDSNSYWRIRGKSATVCERGTPIKCGQPIRLTHVNTGRNLHSHHFTSPLSGNQEVSAFGEEGEGDYLDDWTVLCNGPYWVRDGEVRFKHSSTEVLLSVTGEQYGRPISGQKEVHGMAQPSQNNYWKAMEGIFMKPSELLKAEAHHAEL

SEQ ID NO: 3896 - protein, 256 aa, Homo sapiens
MQELHLLWWALLLGLAQACPEPCDCGEKYGFQIADCAYRDLESVPPGFPANVTTLSLSANRLPGLPEGAFREVPLLQSLWLAHNEIRTVAAGALASLSHLKSLDLSHNLISDFAWSDLHNLSALQLLKMDSNELTFIPRDAFRSLRALRSLQLNHNRLHTLGEGTFTPLTALSHLQINENPFDCTCGIVWLKTWALTTACPSRSRTTSLHLTPCAQGYTAEPPAATAMLGALSAAQLPTQPGWCRAAAWFCAGTAL

SEQ ID NO: 3897 - protein, 71 aa, Homo sapiens
MVFLLEFLFLVFFPGCVNQLLLSYPWQGQGTSLWSSLSFHWLLPQEDSSRLSIFPLRAGSPPQPAQAPQRI

SEQ ID NO: 3898 - protein, 180 aa, Homo sapiens
MPAPARSCQRAALSLWASGLGWLSAQPTVAFRGSSWDWEPPQGQADGVRFVLGLVLPMLGGGGAPRTDQPCFSCNAVTLSLNTWIHVWPGLAGSRSPARVGSHGPALKSPSGPGAAEAASEGLPRPAFHRWGAQPSKAAKTPPRPVCQGAGHNPAGPRTGLQASPCAPAGRPCSREEVLG

SEQ ID NO: 3899 - protein, 128 aa, Homo sapiens
MGGLLFLLGFLGCCGAVRENKCLLLFFFLFILIIFLAELSAAILAFIFRENLTREFFTKELTKHYQGNNDTDVFSATWNSVMITFGCCGVNGPEDFKFASVFRLLTLDSEEVPEPAAGGNPKVGTGSC

SEQ ID NO: 3900 - protein, 321 aa, Homo sapiens
MARRSAFPAAALWLWSILLCLLALRAEAGPPQEESLYLWIDAHQARVLIGFEEDILIVSEGKMAPFTHDFRKAQQRMPAIPVNIHSMNFTWQAAGQAEYFYEFLSLRSLDKGIMADPTVNVPLLGTVPHKASVVQVGFPCLGKQDGVAAFEVDVIVMNSEGNTILQTPQNAIFFKTCQQAECPGGCRNGGFCNERRICECPDGFHGPHCEKALCTPRCMNGGLCVTPGFCICPPGFYGVNCDKANCSTTCFNGGTCFYPGKCICPPGLEGEQCEISKCPQPCRNGGKCIGKSKCKCFQRLPGRPLFKACLRAWLWCTWNLP

SEQ ID NO: 3901 - protein, 180 aa, Homo sapiens
  SITE (77): Xaa equals any amino acid
MCSSGRRIWKSSILCSFRLELGLGTRKTRNSARNRLVLFFSTEDTLKRKTLEVIPLGQTASSLSPQPLDHVEFMDFXGIVFRLGVFLGAAFLPLPMHLLQQLPGAVVKGQDLIGDVGHHRWLRGAGEPELAQDLSPNGFHPLLLDVAEVQGGASGQREADRGKVQQGQDHQSPLQVHLHV

SEQ ID NO: 3902 - protein, 167 aa, Homo sapiens [sequence omitted]

SEQ ID NO: 3903 - protein, 45 aa, Homo sapiens
MAVRRMLWSLHLASWSPPGLASHLVCHLCRKGDTCSRKPGAQTQG

SEQ ID NO: 3904 - protein, 50 aa, Homo sapiens
MESVAGLWGLITLCLQLVVPKLFIPKAPSYHLLQQTSHFRRLSMKLRALQ

SEQ ID NO: 3905 - protein, 45 aa, Homo sapiens
MLRLGIFGFLAFGFVLITFSCHFYDFFNQAEWERTSGTMCYVRPM

SEQ ID NO: 3906 - protein, 87 aa, Homo sapiens
LSLPSSWDYRHPPPRPANFGFLVEMGFHHVGQAGLKLLTSGVSPASASQSAGITGMSHRAQPLCALLKTYLRICDICFIFIFIWFTI

SEQ ID NO: 3907 - protein, 131 aa, Homo sapiens
  SITE (78): Xaa equals any amino acid
PLQLAESLFRNRELIFPFPLSQLKPNSRVVLSCVPLLHPRKYKVHLTWKCSVDKNVSRINVDKIFTGKLCGGSCVLFXFFFNGVSLCHLCWSTVTGSWLMTVSRDGYTPVWATSTKLHLKKKKKKKKKKLV

SEQ ID NO: 3908 - protein, 48 aa, Homo sapiens
MPLPLGKLSCPDSSTFLFLMYLFSLLLCISQFPEFPQAICRGPFWGPI

SEQ ID NO: 3909 - protein, 13 aa, Homo sapiens
MWPGKRATDILSL

SEQ ID NO: 3910 - protein, 11 aa, Homo sapiens
MCVPWPLWGSK

SEQ ID NO: 3911 - protein, 65 aa, Homo sapiens
MGHCCLLVLLLIIILTFTEPSLCEWATLGPYIPTENQEEIKGACTVCVLLNVLVDFAVISKRCPN

SEQ ID NO: 3912 - protein, 53 aa, Homo sapiens
MPAPDSLRPLPVPLLVLVVQPVPTSLPTLVPLVSSGLSEMLDIAINRSSLSPV

SEQ ID NO: 3913 - protein, 308 aa, Homo sapiens
MPGQELRTLNGSQMLLVLLVLSWLPHGGALSLAEASRASFPGPSELHSEDSRFRELRKRYEDLLTRLRANQSWEDSNTDLVPAPAVRILTPEVRLGSGGHLHLRISRAALPEGLPEASRLHRALFRLSPTASRSWDVTRPLRRQLSLARPQAPALHLRLSPPPSQSDQLLAESSSARPQLELHLRPQAARGRRRARARNGDHCPLGPGRCCRLHTVRASLEDLGWADWVLSPREVQVTMCIGACPSQFRAANMHAQIKTSLHRLKPDTVPAPCCVPASYNPMVLIQKTDTGVSLQTYDDLLAKDCHCI

SEQ ID NO: 3914 - protein, 101 aa, Homo sapiens
  SITE (78): Xaa equals any amino acid
  SITE (90): Xaa equals any amino acid
  SITE (95): Xaa equals any amino acid
  SITE (97): Xaa equals any amino acid
MVHLLVLSGAWGMQMWVTFVSGFLLFRSLPRHTFGLVQSKLFPFYFHISMGCAFINLCILASQHAWAQLTFWEASQLXLLFLSLTLATVXARWLXPXWHFR

SEQ ID NO: 3915 - protein, 46 aa, Homo sapiens
MGLPVFLSCLQFCVQVSGTHFFLPLKPSSTSGRDIPYPPCYLRAES

SEQ ID NO: 3916 - protein, 35 aa, Homo sapiens
MVILLSTRGTAGSDIWCMCLAEEPMGRSYHLWDYD

SEQ ID NO: 3917 - protein, 1227 aa, Homo sapiens
  SITE (1195): Xaa equals any amino acid
  SITE (1226): Xaa equals any amino acid
MLSFVDTRTLLLLAVTLCLATCQSLQEETVRKGPAGDRGPRGERGPPGPPGRDGEDGPTGPPGPPGPPGPPGLGGNFAAQYDGKGVGLGPGPMGLMGPRGPPGAAGAPGPQGFQGPAGEPGEPGQTGPAGARGPAGPPGKAGEDGHPGKPGRPGERGVVGPQGARGFPGTPGLPGFKGIRGHNGLDGLKGQPGAPGVKGEPGAPGENGTPGQTGARGLPGERGRVGAPGPAGARGSDGSVGPVGPAGPIGSAGPPGFPGAPGPKGEIGAVGNAGPAGPAGPRGEVGLPGLSGPVGPPGNPGANGLTGAKGAAGLPGVAGAPGLPGPRGIPGPVGAAGATGARGLVGEPGPAGSKGESGNKGEPGSAGPQGPPGPSGEEGKRGPNGEAGSAGPPGPPGLRGSPGSRGLPGADGRAGVMGPPGSRGASGPAGVRGPNGDAGRPGEPGLMGPRGLPGSPGNIGPAGKEGPVGLPGIDGRPGPIGPAGARGEPGNIGFPGPKGPTGDPGKNGDKGHAGLAGARGAPGPDGNNGAQGPPGPQGVQGGKGEQGPAGPPGFQGLPGPSGPAGEVGKPGERGLHGEFGLPGPAGPRGERGPPGESGAAGPTGPIGSRGPSGPPGPDGNKGEPGVVGAVGTAGPSGPSGLPGERGAAGIPGGKGEKGEPGLRGEIGNPGRDGARGAPGAVGAPGPAGATGDRGEAGAAGPAGPAGPRGSPGERGEVGPAGPNGFAGPAGAAGQPGAKGERGAKGPKGENGVVGPTGPVGAAGPAGPNGPPGPAGSRGDGGPPGMTGFPGAAGRTGPPGPSGISGPPGPPGPAGKEGLRGPRGDQGPVGRTGEVGAVGPPGFAGEKGPSGEAGTAGPPGTPGPQGLLGAPGILGLPGSRGERGLPGVAGAVGEPGPLGIAGPPGARGPPGAVGSPGVNGAPGEAGRDGNPGNDGPPGRDGQPGHKGERGYPGNIGPVGAAGAPGPHGPVGPAGKHGNRGETGPSGPVGPAGAVGPRGPSGPQGIRGDKGEPGEKGPRGLPGLKGHNGLQGLPGIAGHHGDQGAPGSVGPAGPRGPAGPSGPAGKDGRTGHPGTVGPAGIRGPQGHQGPAGPPGPPGPPGPPGVSGGGYDFGYDGDFYRADQPRSAPSLRPKDYEVDATLKSLNNQIETLLTPEGSRKNPARTCRDLRLSHPEWSSGYYWIDPNQGCTMDAIKVYXDFSTGETCIRAQPENIPPRTGIGAPRTRNTXG

SEQ ID NO: 3918 - protein, 49 aa, Homo sapiens
MASPGGRPRCTQEKTLGTGCFHRAESPTAAQRQGEGSRGAAGPETIPPE

SEQ ID NO: 3919 - protein, 46 aa, Homo sapiens
MVASFIVYFSIITILYFNITNSSLYDTVNQHFKLKFFFSQDSNYGR

SEQ ID NO: 3920 - protein, 101 aa, Homo sapiens
PRVRGIHSVLQKRFCGLIQKHQQHQRGGDSFLSRFYSLALSPVKQLPSTASAGSSLDKGRKPARVGAIGSAGMSHCWRSLVFCLFLFCFVLFFETGSRSVA

SEQ ID NO: 3921 - protein, 297 aa, Homo sapiens
MSLFGLLLLTSALAGQRQGTQAESNLSSKFHFPATRNRTVGTISKHLDWHRKEEKEHLKGVQDPQHERIITVSTNGSIHSPRFPHTYPRNTVLVWRLVAVEENVWIQLTFDERFGLEDPEDDICKYDFVEVEEPSDGTILGRWCGSGTVPGKQISKGNQIRIRFVSDEYFPSEPGFCIHYNIVMPQFTEAVSPSVLPPSALPLDLLNNAITAFSTLEDLIRYLEPERWQLDLEDLYRPTWQLLGKAFVFGRKSRVVDLNLLTEEVRLYSCTPRNFSVAIRERTKENRYHFLARLSPG

SEQ ID NO: 3922 - protein, 464 aa, Homo sapiens
MGSPAHRPALLLLLPPLLLLLLLRVPPSRSFPGSGDSPLEDDEVGYSHPRYKDTPWCSPIKVKYGDVYCRAPQGGYYKTALGTRCDIRCQKGYELHGSSLLICQSNKRWSDKVICKQKRCPTLAMPANGGFKCVDGAYFNSRCEYYCSPGYTLKGERTVTCMDNKAWSGRPASCVDMEPPRIKCPSVKERIAEPNKLTVRVSWETPEGRDTADGILTDVILKGLPPGSNFPEGDHKIQYTVYDRAENKGTCKFRVKVRVKRCGKLNAPENGYMKCSSDGDNYGATCEFSCIGGYELQGSPARVCQSNLAWSGTEPTCAAMNVNVGVRTAAALLDQFYEKRRLLIVSTPTARNLLYRLQLGMLQQAQCGLDLRHITVVELVGVFPTLIGRIGAKIMPPALALQLRLLLRIPLYSFSMVLVDKHGMDKERYVSLVMPVALFNLIDTFPLRKEEMVLQAEMSQTCNT

SEQ ID NO: 3923 - protein, 54 aa, Homo sapiens; identical to SEQ ID NO: 3217

SEQ ID NO: 3924 - protein, 469 aa, Homo sapiens
MHSFPPLLLLLFWGVVSHSFPATLETQEQDVDLVQKYLEKYYNLKNDGRQVEKRRNSGPVVEKLKQMQEFFGLKVTGKPDAETLKVMKQPRCGVPDVAQFVLTEGNPRWEQTHLTYRIENYTPDLPRADVDHAIEKAFQLWSNVTPLTFTKVSEGQADIMISFVRGDHRDNSPFDGPGGNLAHAFQPGPGIGGDAHFDEDERWTNNFREYNLHRVAAHELGHSLGLSHSTDIGALMYPSYTFSGDVQLAQDDIDGIQAIYGRSQNPVQPIGPQTPKACDSKLTFDAITTIRGEVMFFKDRFYMRTNPFYPEVELNFISVFWPQLPNGLEAAYEFADRDEVRFFKGNKYWAVQGQNVLHGYPKDIYSSFGFPRTVKHIDAALSEENTGKTYFFVANKYWRYDEYKRSMDPGYPKMIAHDFPGIGHKVDAVFMKDGFFYFFHGTRQYKFDPKTKRILTLQKANSWFNCRKN

SEQ ID NO: 3925 - protein, 107 aa, Homo sapiens
  SITE (38): Xaa equals any amino acid
MAHATLSAAPSNPRLLRVALLLLLLVAASRRAAGASVXTELRCQCLQTLQGIHLKNIQSVNVRSPGPHCAQTEVIATLKNGKKACLNPASPMVQKIIEKILNKGSTN

SEQ ID NO: 3926 - protein, 381 aa, Homo sapiens [sequence omitted]

SEQ ID NO: 3927 - protein, 229 aa, Homo sapiens
MAPHGPGSLTTLVPWAAALLLALGVERALALPEICTQCPGSVQNLSKVAFYCKTTRELMLHARCCLNQKGTILGLDLQNCSLEDPGPNFHQAHTTVIIDLQANPLKGDLANTFRGFTQLQTLILPQHVNCPGGINAWNTITSYIDNQICQGQKNLCNNTGDPEMCPENGSCVPDGPGLLQCVCADGFHGYKCMRQGSFSLLMFFGILGATTLSVSILLWATQRRKAKTS

SEQ ID NO: 3928 - protein, 162 aa, Homo sapiens
TVSFHKTMASLKCSTVVCVICLEKPKYRCPACRVPYCSVVCFRKHKEQCNPETRPVEKKIRSALPTKTVKPVENKDDDDSIADFLNSDEEEDRVSLQNLKNLGESATLRSLLLNPHLRQLMVNLDQGEDKAKLMRAYMQEPLFVEFADCCLGIVEPSQNEES

SEQ ID NO: 3929 - protein, 194 aa, Homo sapiens; identical to SEQ ID NO: 3872
  SITE (182): Xaa equals any amino acid
  SITE (190): Xaa equals any amino acid
  SITE (194): Xaa equals any amino acid

SEQ ID NO: 3930 - protein, 70 aa, Homo sapiens
MANAGLQLLGFILAFLGWIGAIVSTALPQWRIYSYAGDNIVTPRPCTRGCGCPACRRAPGRSSAKSLTPC

SEQ ID NO: 3931 - protein, 180 aa, Homo sapiens
  SITE (48): Xaa equals any amino acid
  SITE (165): Xaa equals any amino acid
  SITE (169): Xaa equals any amino acid
  SITE (179): Xaa equals any amino acid
MHLLAILFCALWSAVLAENSDDYDLMYVNLDNEIDNGLHPTEDPTPCXCGQEHSEWDKLFIMLENSQMRERMLLQATDDVLRGELQRLREELGRLAESLARPCAPGAPAEARLTSALDELLQATRDAGRRLARMEGAEAQRPEEAGRALAAVLEELAARRQAELXRRCXGLGLPRNWLXR

SEQ ID NO: 3932 - protein, 173 aa, Homo sapiens
MAAPSGGWNGVGASLWAALLLGAVALRPAEAVSEPTTVAFDVRPGGVVHSFSHNVGPGDKYTCMFTYASQGGTNEQWQMSLGTSEDHQHFTCTIWRPQGKSYLYFTQFKAEVRGAEIEYAMAYSKAAFERESDVPLKTEEFEVTKTAVAHRPGAFKAELSKLVIVAKASRTEL

SEQ ID NO: 3933 - protein, 95 aa, Homo sapiens
MVPCRKTLLFLWVGSLCRDVGSWSGWPFGLSTATQPRLRLGKQTGAGQARRACRTVILRCGSCCRGRRTGSVVAWSSLPQRTSAAELRWRPWGPV

SEQ ID NO: 3934 - protein, 197 aa, Homo sapiens
MEPPGDWGPPPWRSTPKTDVLRLVLYLTFLGAPCYAPALPSCKEDEYPVGSECCPKCSPGYRVKEACGELTGTVCEPCPPGTYIAHLNGLSKCLQCQMCDPAMGLRASRNCSRTENAVCGCSPGHFCIVQDGDHCAACRAYATSSPGQRVQKGGTESQDTLCQNCPPGTFSPNGTLEECQHQTNWPNHMCEKKKAKG

SEQ ID NO: 3935 - protein, 26 aa, Homo sapiens
MFLKLNMNGIILYIGFVVCFCHSILC

SEQ ID NO: 3936 - protein, 232 aa, Homo sapiens
MPSLWDRFSSSSTSSSPSSLPRTPTPDRPPRSAWGSATREEGFDRSTSLESSDCESLDSSNSGFGPEEDTAYLDGVSLPDFELLSDPEDEHLCANLMQLLQESLAQARLGSRRPARLLMPSQLVSQVGKELLRLAYSEPCGLRGALLDVCVEQGKSCHSVGQLALDPSLVPTFQLTLVLRLDSRLWPKIQGLFSSANSPFLPGFSQSLTLSTGFRVIKKKLYSSEQLLIEEC

SEQ ID NO: 3937 - protein, 194 aa, Homo sapiens
MGAGLAVQGWFLLQLHWRLGEMVTRLPDGPAGSWEQLIQERRSHEVNPAAHLTGANSSLTGSGGPLLWETQLGLAFLRGLSYHDGALVVTKAGYYYIYSKVQLGGVGCPLGLASTITHGLYKRTPRYPEELELLVSQQSPCGRATSSSRVWWDSSFLGGVVHLEAGEEVVVRVLDERLVRLRDGTRSYFGAFMV

SEQ ID NO: 3938 - protein, 255 aa, Homo sapiens
  SITE (255): Xaa equals any amino acid
MGRAWLRAGQGGVERGTTPPGSSADGRQPGPLLPGAGKQRRRPAWHPGWAAGQGPFPVLPSAARWWWQSRRRPAAVCPRWDPTRGRSLPGPAGAPGRGKGRYGVGSSSLPAAGPGWGSCSGEPRGCPESVRAAPAPRGGTACRWHTHSPASPGSAAPSPWIFLTCSKHLSRKLWGRELAGPRGVASCTVQSALCHSSSCRAISFMGLWVAGPAMGPRAEFLQPGGSTSSRAAATAVELQLLFPLVGLISSGRINX

SEQ ID NO: 3939 - protein, 122 aa, Homo sapiens
MCVGARRLGRGPCAALLLLGLGLSTVTGLHCVGDTYPSNDRCCHECRPGNGMVSRCSRSQNTVCRPCGPGFYNDVVSSKPCKPCTWCNLRSGSERKQLCTAHRTQSAAAGGHPAPGQLQAWS

SEQ ID NO: 3940 - protein, 50 aa, Homo sapiens
MAPEGPSPSCALGPQPLPQPPRTYLAPALSTSPVFSPASAPSVSYLPGTG

SEQ ID NO: 3941 - protein, 103 aa, Homo sapiens
MVHTKPPPLSPYKAQPHPPHSPGARGPLAKKGQPTFSQEKPSSSSPPLASSGPWRIQDQLCAMPPRTHLSLSSSGPSQIPLPRQTPSSPAPLGRVPRAWPRLI

SEQ ID NO: 3942 - protein, 35 aa, Homo sapiens
MHLDWFVLLGCSLLSFSSCVMVNCVKLCFPLNYEP

SEQ ID NO: 3943 - protein, 371 aa, Homo sapiens
  SITE (364): Xaa equals any amino acid
MGRLVLLWGAAVFLLGGWMALGQGGAAEGVQIQIIYFNLETVQVTWNASKYSRTNLTFHYRFNGDEAYDQCTNYLLQEGHTSGCLLDAEQRDDILYFSIRNGTHPVFTASRWMVYYLKPSSPKHVRFSWHQDAVTVTCSDLSYGDLLYEVQYRSPFDTEWQSKQENTCNVTIEGLDAEKCYSFWVRVKAMEDVYGPDTYPSDWSEVTCWQRGEIRDACAETPTPPKPKLSKFILISSLAILLMVSLLLLSLWKLWRMKKFLIPSVPDPKSIFPGLFEIHQGNFQEWITDTQNVAHLHKMAGAEQESGPEEPLVVQLAKTEAESPRMLDPQTEEKEASGGSLQLPHQPLQGGDVVTIGGFTFVMXDRSYVAL

SEQ ID NO: 3944 - protein, 41 aa, Homo sapiens
MSGDILGSCFWCCWYPVGRSQGAAKYPTMHRQPPATKKYPS

SEQ ID NO: 3945 - protein, 64 aa, Homo sapiens
MCTHKRVAALQFFFSFLLLQITTILLCLSRNLTIAGTSYEWNHVVFVLFCLGYFSKHKIFKIHL

SEQ ID NO: 3946 - protein, 54 aa, Homo sapiens
MIVILGQSFSALALLTFWLILCCRGCPVHCRVFSSIPDLYLLNARSNTVPPAQL

SEQ ID NO: 3947 - protein, 171 aa, Homo sapiens
MLHARCCLNQKGTILGLDLQNCSLEDPGPNFHQAHTTVIIDLQANPLKGDLANTFRGFTQLQTLILPQHVNCPGGINAWNTITSYIDNQICQGQKNLCNNTGDPEMCPENGSCVPDGPGLLQCVCADGFHGYKCMRQGSFSLLMFFGILGATTLSVSILLWATQRRKAKTS

SEQ ID NO: 3948 - protein, 229 aa, Homo sapiens; identical to SEQ ID NO: 3231
  SITE (175): Xaa equals any amino acid

SEQ ID NO: 3949 - protein, 34 aa, Homo sapiens
DLTLFYLCIQFLCHNVLFCFSFSIVEEGRSSKLL

SEQ ID NO: 3950 - protein, 162 aa, Homo sapiens
MAFLRSMWGVLSALGRSGAELCTGCGSRLRSPFSFVYLPRWFSSVLASCPKKPVSSYLRFSKEQLPIFKAQNPDAKTTELIRRIAQRWRELPDSKKKIYQDAYRAEWQVYKEEISRFKEQLTPSQIMSLEKEIMDKHLKRKAMTKKKRVNTAWKTKKTSFSL

SEQ ID NO: 3951 - protein, 229 aa, Homo sapiens [sequence omitted]

SEQ ID NO: 3952 - protein, 114 aa, Homo sapiens
MAKAPFYHLLFCFGIWSDSYSSLGLAQWRNWCSYCTGLCTPCNCDVYDCSSCFPILHFQSPRAVLSRITSTVNQRRDCTTRHVCWERRKGEKPWPKQSIPQILRHSFVYLVFHH

SEQ ID NO: 3953 - protein, 163 aa, Homo sapiens
MGSTWGSPGWVRLALCLTGLVLSLYALHVKAARARDRDYRALCDVGTAISCSRVFSSRWGRGFGLVEHVLGQDSILNQSNSIFGCIFYTLQLLLGCLRTRWASVLMLLSSLVSLAGSVYLAWILFFVLYDFCIVCITTYAINVSLMWLSFRKVQEPQGKAKRH

SEQ ID NO: 3954 - protein, 74 aa, Homo sapiens [sequence omitted]

SEQ ID NO: 3955 - protein, 117 aa, Homo sapiens
YFYEFFFFLETVLLCRQTGVQWRDLGSLQSPPPGFKQFSCLSLLSRWDYRHVPPCPANFFCIFSRGGVSPCWPGWSRSPDLVICPPRPPKCWDYRREPPHLVFTKLLISPSCTLLIF

SEQ ID NO: 3956 - protein, 60 aa, Homo sapiens
MAWAVTLILSLSRAVRTQEVPMALQAHSGIQLASRVGLPGPWPECSTLSSRCHLSMDSKV

SEQ ID NO: 3957 - protein, 214 aa, Homo sapiens [sequence omitted]

SEQ ID NO: 3958 - protein, 30 aa, Homo sapiens
MGTQPPVVAGFTIPMLGYTVRVLTFHLSCS

SEQ ID NO: 3959 - protein, 31 aa, Homo sapiens
MALLQSRTLIFIFMSHSWGLVGRIEGQLTQE

SEQ ID NO: 3960 - protein, 38 aa, Homo sapiens
MIPVTFFYTHSAFQSFFRLLLVLPVFCTWVKLSCFVPP

SEQ ID NO: 3961 - protein, 1 aa, Homo sapiens
L

SEQ ID NO: 3962 - protein, 193 aa, Homo sapiens; identical to SEQ ID NO: 3469

SEQ ID NO: 3963 - protein, 43 aa, Homo sapiens; identical to SEQ ID NO: 3416

SEQ ID NO: 3964 - protein, 21 aa, Homo sapiens
MNLIIYLEWLVICSYYQKAFF

SEQ ID NO: 3965 - protein, 29 aa, Homo sapiens
MVPQLGAGHASRSVAPALALSPAAAPGRA

SEQ ID NO: 3966 - protein, 86 aa, Homo sapiens
MARAPPLLAALTALLAAAAAGGDAPPGKIAVVGAGIGGSAVAHFLQQHFGPRVQIDVYEREPWVAAWPPSQSTSSTMRAGLPPSTP

SEQ ID NO: 3967 - protein, 48 aa, Homo sapiens
WVFIPNGKFTLLSLELFFFQLFWNLCFLLIYTIQLVGGWTWDGSGKSM

SEQ ID NO: 3968 - protein, 60 aa, Homo sapiens
MSGLWPILILMLCSSASTLADQKHWTVFSRSGKERLKSSAPMPRLCWLAVNWTCGLTWPH

SEQ ID NO: 3969 - protein, 96 aa, Homo sapiens
MSSTSISCPEPMLSPSHWLQAPAAPVCGTVHLLRDAEEQESDQEGSVKVPQMRLPAPSLLPLQHRDQVGEPAEPVQAQWLLKPACPAESPWHGAYT

SEQ ID NO: 3970 - protein, 152 aa, Homo sapiens
MLLVLSLCLYSGAMLVTCLIFLVRTTHLPFSTDKAIAIVVAVSAAGLLVPLSLLLLIQALSVSSADRTYKGKCRHLQGYNPFDQGCASNWYLTICAPLGPKYMAEAVQLQRVVGPDWTSMPNLHPPMSPSALNPPAPTSGSLQSREGTPGAW

SEQ ID NO: 3971 - protein, 273 aa, Homo sapiens
MAGDWHWALRVTPGLGVVAVLLLFLVVREPPRGAVERHSDLPPLNPTSWWADLRALARNPSFVLSSLGFTAVAFVTGSLALWAPAFLLRSRVVLGETPPCLPGDSCSSSDSLIFGLITCLTGVLGVGLGVEISRRLRHSNPRADPLVCATGLLGSAPFLFLSLACARGSIVATYIFIFIGETLLSMNWAIVADILLYVVIPTRRSTAEAFQIVLSHLLGDAGSPYLIGLISDRLRRNWPPSFLSEFRALQFSLMLCAFVGALGGALPGHRHLH

SEQ ID NO: 3972 - protein, 81 aa, Homo sapiens
MWPPLLLLLLLLPAAPVPTAKAAPHPDANTQEGLQNLLQGVGAGGDGELRADSHLAPGSGCIDGAVVATRPESRGGRPAVP

SEQ ID NO: 3973 - protein, 75 aa, Homo sapiens
MMVLPLLIFVLLPKVVNTSDPDMRREMEQSMNMLNSNHELPDVSEFMTRLFSSKSSGKSSSGSSKTGKSGAGKRR

SEQ ID NO: 3974 - protein, 233 aa, Homo sapiens
MAWTPLLLPLLTFCTVSVASYELTQPPSVSVSPGQTARITCSGDELPKTYAFWYQQKSGQAPVLVIYADNKRPSRIPERFSGSSSGTVATLTISGAQVEDAADYYCYSTDSSGNHGVFGTGTKVTVLGQPKANPTVTLFPPSSEELQANKATLVCLISDFYPGAVTVAWKADGSPVKAGVETTKPSKQSNNKYAASSYLSLTPEQWKSHRSYSCQVTHEGSTVEKTVAPTECS

SEQ ID NO: 3975 - protein, 245 aa, Homo sapiens; identical to SEQ ID NO: 3165

SEQ ID NO: 3976 - protein, 65 aa, Homo sapiens
MLCWLKLVSITTVAIILNWAQHAENTTECAHWLSLIQVTLTSLEACQNRLVKSKPFHLQNFTCKP

SEQ ID NO: 3977 - protein, 65 aa, Homo sapiens
MHIRPHTFLWVSFWLNHGLHRWYSMALLYILIFSDFLFDRNNLEVFCLILKFLRQLILIVHYYYF

SEQ ID NO: 3978 - protein, 101 aa, Homo sapiens [sequence omitted]

SEQ ID NO: 3979 - protein, 335 aa, Homo sapiens [sequence omitted]

SEQ ID NO: 3980 - protein, 24 aa, Homo sapiens
VAGTAFSFLYLVLPSEDLVRQDWW

SEQ ID NO: 3981 - protein, 32 aa, Homo sapiens
  SITE (26): Xaa equals any amino acid
NRKTLETLPLSSHHISRTLTSQVSLXTPFHTS

SEQ ID NO: 3982 - protein, 468 aa, Homo sapiens; identical to SEQ ID NO: 3196

SEQ ID NO: 3983 - protein, 14 aa, Homo sapiens
MIPISFLNFFFFFF

SEQ ID NO: 3984 - protein, 12 aa, Homo sapiens
MEIILILLILMD

SEQ ID NO: 3985 - protein, 430 aa, Homo sapiens
CAGSGFAFSDYALQWVRQAPGKGLEWVAFISYEGNNKQYEDSVKGRFSISRDNSNNSVFLEMNSLKSEDTAVYYCVRDRSGRGTDYFDYWGRGTLVTVSSASTKGPSVFPLAPSSKSTSGGTAALGCLVKDYFPEPVTVSWNSGALTSGVHTFPAVLQSSGLYSLSSVVTVPSSSLGTQTYICNVNHKPSNTKVDKKVEPKSCDKTHTCPPCPAPELLGGPSVFLFPPKPKDTLMISRTPEVTCVVVDVSHEDPEVKFNWYVDGVEVHNAKTKPREEQYNSTYRVVSVLTVLHQDWLNGKEYKCKVSNKALPAPIEKTISKAKGQPREPQVYTLPPSRDELTKNQVSLTCLVKGFYPSDIAVEWESNGQPENNYKTTPPVLDSDGSFFLYSKLTVDKSRWQQGNVFSCSVMHEALHNHYTQKSLSLSPGK

SEQ ID NO: 3986 - protein, 24 aa, Homo sapiens
MCLLLCILHIPGLYSFLSFFFFFF

SEQ ID NO: 3987 - protein, 298 aa, Homo sapiens
MFFFFDSVQVVFTICTAVLATIAFAFLLLPMCQYLTRPCSPQNKISFGCCGRFTAAELLSFSLSVMLVLIWVLTGHWLLMDALAMGLCVAMIAFVRLPSLKVSCLLLSGLLIYDVFWVFFSAYIFNSNVMVKVATQPADNPLDVLSRKLHLGPNVGRDVPRLSLPGKLVFPSSTGSHFSMLGIGDIVMPGLLLCFVLRYDNYKKQASGDSCGAPGPANISGRMQKVSYFHCTLIGYFVGLLTATVASRIHRAAQPALLYLVPFTLLPLLTMAYLKGDLRRMWSEPFHSKSSSSRFLEV

SEQ ID NO: 3988 - protein, 281 aa, Homo sapiens [sequence omitted]

SEQ ID NO: 3989 - protein, 216 aa, Homo sapiens
  SITE (140): Xaa equals any amino acid
MLPCPIPFSPSRLLIPPFPSFPSNYQLWLGRHNLFDDENTAQFVHVSESFPHPGFNMSLLENHTRQADEDYSHDLMLLRLTEPADTITDAVKVVELPTQEPEVGSTCLASGWGSIEPENFSFPDDLQCVDLKILPNDECXKAHVQKVTDFMLCVGHLEGGKDTCVGDSGGPLMCDGVLQGVTSWGYVPCGTPNKPSVAVRVLSYVKWIEDTIAENS

SEQ ID NO: 3990 - protein, 170 aa, Homo sapiens [sequence omitted]

SEQ ID NO: 3991 - protein, 247 aa, Homo sapiens
KKTTCGTVCLKYLLFTYNCCFWLAGLAVMAVGIWTLALKSDYISLLASGTYLATAYILVVAGTVVMVTGVLGCCATFKERRNLLRLYFILLLIIFLLEIIAGILAYAYYQQLNTELKENLKDTMTKRYHQPGHEAVTSAVDQLQQEFHCCGSNNSQDWRDSEWIRSQEAGGRVVPDSCCKTVVALCGQRDHASNIYKVEGGCITKLETFIQEHLRVIGAVGIGIACVQVFGMIFTCCLYRSLKLEHY

SEQ ID NO: 3992 - protein, 43 aa, Homo sapiens
MFVNQLRQEVAVLLLLWVFGCPRLLGSRRPSGRICASHRGYNG

SEQ ID NO: 3993 - protein, 60 aa, Homo sapiens
ELVFIFCVCVCFILFGFFFLILLLELAVLPTFFPTSTLTPSQPISSEMKEKKKQSFFFFS

SEQ ID NO: 3994 - protein, 141 aa, Homo sapiens [sequence omitted]

SEQ ID NO: 3995 - protein, 406 aa, Homo sapiens
MGPSTPLLILFLLSWSGPLQGQQHHLVEYMERRLAALEERLAQCQDQSSRHAAELRDFKNKMLPLLEVAEKEREALRTEADTISGRVDRLEREVDYLETQNPALPCVEFDEKVTGGPGTKGKGRRNEKYDMVTDCGYTISQVRSMKILKRFGGPAGLWTKDPLGQTEKIYVLDGTQNDTAFVFPRLRDFTLAMAARKASRVRVPFPWVGTGQLVYGGFLYFARRPPGRPGGGGEMENTLQLIKFHLANRTVVDSSVFPAEGLIPPYGLTADTYIDLAADEEGLWAVYATREDDRHLCLAKLDPQTLDTEQQWDTPCPRENAEAAFVICGTLYVVYNTRPASRARIQCSFDASGTLTPERAALPYFPRRYGAHASLRYNPRERQLYAWDDGYQIVYKLEMRKKEEEV

SEQ ID NO: 3996 - protein, 172 aa, Homo sapiens
GTRTERDELLKDLQQSIAREPSAPSIPTPAYQSLPAGGHAPTPPTPAPRTMPPTKPQPPARPPPPVLPANRAPSATAPSPVGAGTAAPAPSQTPGSAPPPQAQGPPYPTYPGYPGYCQMPMPMGYNPYAYGQYNMPYPPVYHQSPGQAPYPGPQQPSYPFPQPPQQSYYPQQ

SEQ ID NO: 3997 - protein, 440 aa, Homo sapiens
MIRSSSQDSEVSTVVSNSSGETLGADSDLSSNAGDGPGGEGSVHLASSRGTLSDSEIETNSATSTIFGKAHSLKPSIKEKLAGSPIRTSEDVSQRVYLYEGLLGKERSTLWDQMQFWEDAFLDAVMLEREGMGMDQGPQEMIDRYLSLGEHDRKRLEDDEDRLLATLLHNLISYMLLMKVNKNDIRKKVRRLMGKSHIGLVYSQQINEVLDQLANLNGRDLSIWSSGSRHMKKQTFVVHAGTDTNGDIFFMEVCDDCVVLRSNIGTVYERWWYEKLINMTYCPKTKVLCLWRRNGSETQLNKFYTKKCRELYYCVKDSMERAAARQQSIKPGPELGGEFPVQDLKTGEGGLLQVTLEGINLKFMHNQVFIELNHIKKCNTVRGVFVLEEFVPEIKEVVSHKYKTPMAHEICYSVLCLFSYVAAVHSSEEDLRTPPRPVSS

SEQ ID NO: 3998 - protein, 5 aa, Homo sapiens
MKALC

SEQ ID NO: 3999 - protein, 180 aa, Homo sapiens
MDWPHNLLFLLTISIFLGLGQPRSPKSKRKGQGRPGPLAPGPHQVPLDLVSRMKPYARMEEYERNIEEMVAQLRNSSELAQRKCEVNLQLWMSNKRSLSPWGYSINHDPSRIPVDLPEARCLCLGCVNPFTMQEDRSMVSVPVFSQVPVRRRLCPPPPRTGPCRQRAVMETIAVGCTCIF

SEQ ID NO: 4000 - protein, 123 aa, Homo sapiens
MQICVSRHANKQHLLLFASAAWALFLGNRGGVCTPVLPRAGDTGGQGGGQGGFPAQEGRAVRLPAFPPGPGWLGLGRRAPRSCEAADRSLRPLVLSDVPLLQDDLSLPGRQLALIVAQRPQLL

SEQ ID NO: 4001 - protein, 298 aa, Homo sapiens
MKTLQSTLLLLLLVPLIKPAPPTQQDSRIIYDYGTDNFEESIFSQDYEDKYLDGKNIKEKETVIIPNEKSLQLQKDEAITPLPPKKENDEMPTCLLCVCLSGSVYCEEVDIDAVPPLPKESAYLYARFNKIKKLTAKDFADIPNLRRLDFTGNLIEDIEDGTFSKLSLLEELSLAENQLLKLPVLPPKLTLFNAKYNKIKSRGIKANAFKKLNNLTFLYLDHNALESVPLNLPESLRVIHLQFNNIASITDDTFCKANDTSYIRDRIEEIRLEGNPIVLGKHPNSFICLKRLPIGSYF

SEQ ID NO: 4002 - protein, 211 aa, Homo sapiens [sequence omitted]

SEQ ID NO: 4003 - protein, 154 aa, Homo sapiens
MTRGGPGGRPGLPQPPPLLLLLLLPLLLVTAEPPKPAGVYYATAYWMPAEKTVQVKNVMDKNGDAYGFYNNSVKTTGWGILEIRAGYGSQTLSNEIIMFVAGFLEGYLIAPHMNDHYTNLYPQLITKPSIMDKVQDFMEKQDKVDPEKYQRIQD

SEQ ID NO: 4004 - protein, 28 aa, Homo sapiens
MGIFICLWDHFMELYHQSVVTGSKCHDP

SEQ ID NO: 4005 - protein, 322 aa, Homo sapiens
  SITE (77): Xaa equals any amino acid
  SITE (84): Xaa equals any amino acid
MSPNFKLQCHFILIFLTALRGESRYLELREAADYDPFLLFSANLKRELAGEQPYRRALRCLDMLSLQGQFTFTADRXQLHCAAXFISEPEEFITIHYDQVSIDCQGGDFLKVFDGWILKGEKFPSSQDHPLPSAERYIDFCESGLSRRSIRSSQNVAMIFFRVHEPGNGFTLTIKTDPNLFPCNVISQTPNGKFTLVVPHQHRNCSFSIIYPVVIKISDLTLGHVNGLQLKKSSAGCEGIGDFVELLGGTGLDPSKMTPLADLCYPFHGPAQMKVGCDNTVVRMVSSGKHVNRVTFEYRQLEPYELENPNGNSIGEFCLSGL

SEQ ID NO: 4006 - protein, 131 aa, Homo sapiens
  SITE (99): Xaa equals any amino acid
MWQPPSARIMMRQILQVNKVMSILFYVIFLAYLRGIQGNNMDQRSLPEDSLNSLIIKLIQADILKNKLSKQMVDVKENYQSTLPKAEAPREPERGGPAXSAFQPVIAMDTELLRQQRRYNSPRVLLSDTPP

SEQ ID NO: 4007 - protein, 31 aa, Homo sapiens
MRLIPVWIFVLTCIIKLAFGPFPFYLPCDLS

SEQ ID NO: 4008 - protein, 77 aa, Homo sapiens
MSPTSPSIRTALATACSIMLLWAATAWAPPPSTWSPRMCRRTCTAAWPRRWRCSVGRTPSGACGWHRCWKVSSPARW

SEQ ID NO: 4009 - protein, 26 aa, Homo sapiens
MFYNYFLAFSPLGCELLPVLCLAVAF

SEQ ID NO: 4010 - protein, 85 aa, Homo sapiens [sequence omitted]

SEQ ID NO: 4011 - protein, 12 aa, Homo sapiens
MWQCDPLTCGVT

SEQ ID NO: 4012 - protein, 52 aa, Homo sapiens
MSSFTQVTGVSAILIFFFFSTFCVSMLGLEKAGTLALPRWLFISTHTSTTPV

SEQ ID NO: 4013 - protein, 26 aa, Homo sapiens
  SITE (25): Xaa equals any amino acid
MNTLKAATFALCLGLQQPAMGKTKXF

SEQ ID NO: 4014 - protein, 55 aa, Homo sapiens
MSSASPHTVVCSVLCLAWVPSSWPLALALLSWHCWACSMCTVMGPLTQQPSCCMP

SEQ ID NO: 4015 - protein, 69 aa, Homo sapiens [sequence omitted]

SEQ ID NO: 4016 - protein, 85 aa, Homo sapiens
MTAAVTTWPLCGLSPAGRRCCVGRTAAPGRITWRKTCCTHPACASSTDSSSSSQRTFMRPSWWGSPRTAPWPPPSATSTVRRRSW

SEQ ID NO: 4017 - protein, 172 aa, Homo sapiens
MATWALLLLAAMLLGNPGLEVSVSPKGKNTSGRESGFGWAIWMEGLVFSRLSPEYYDLARAHLRDEEKSCPCLAQEGPQGDLLTKTQELGRDYRTCLTIVQKLKKMVDKPTQRSVSNAATRVCRTGRSRWRDVCRNFMRRYQSRVTQGLVAGETAQQICEDLRLCIPSTGPL

SEQ ID NO: 4018 - protein, 392 aa, Homo sapiens
  SITE (278): Xaa equals any amino acid
MAAACGPGAAGYCLLLGLHLFLLTAGPALGWNDPDRMLLRDVKALTLHYDRYTTSRRLDPIPQLKCVGGTAGCDSYTPKVIQCQNKGWDGYDVQWECKTDLDIAYKFGKTVVSCEGYESSEDQYVLRGSCGLEYNLDYTELGLQKLKESGKQHGFASFSDYYYKWSSADSCNMSGLITIVVLLGIAFVVYKLFLSDGQYSPPPYSEYPPFSHRYQRFTNSAGPPPPGFKSEFTGPQNTGHGATSGFGSAFTGQQGYENSGPGFWTGLGTGGILGYLFXSNRAATPFSDSWYYPSYPPSYPGTWNRAYSPLHGGSGSYSVCSNSDTKTRTASGYGGTRRRLSRKLESNTGCRNFGFFITFSLEKKYYLLTIGKRGYSKVLWCYVQCSFLYSII

SEQ ID NO: 4019 - protein, 178 aa, Homo sapiens
MMLSKFQLNRPSRKSFFKCKSRSFTNWATSILVSRTCKLENCPAETLCGQNPLSILWVFSMALQPDTLIRDSRAAQYMPAVRLMLHTMLPLQSGAFWFWVMLTSSSMSSLRAVEGGTGPGEAKPPRQVRAMTVVNKSAMRPSANRRGLRSLVPNSCSPGDPLVLERPPPRWSSSFCSL

SEQ ID NO: 4020 - protein, 178 aa, Homo sapiens
  SITE (144): Xaa equals any amino acid
  SITE (163): Xaa equals any amino acid
  SITE (176): Xaa equals any amino acid
  SITE (177): Xaa equals any amino acid
MTPGKTSLVSLLLLLSLEAIVKAGITIPRNPGCPNSEDKNFPRTVMVNLNIHNRNTNTNPKRSSDYYNRSTSPWNLHRNEDPERYPSVIWEAKCRHLGCINADGNVDYHMNSVPIQQEILVLRREPPHCPNSFRLEKILVSVGXTCVTPIVTMWPKSSGEPHXPKQLDYGEPTQPXXT

SEQ ID NO: 4021 - protein, 17 aa, Homo sapiens
MAEELSACGPPGADWGP

SEQ ID NO: 4022 - protein, 78 aa, Homo sapiens
  SITE (74): Xaa equals any amino acid
MAFQNFAQKHSKSDMPLLLLYCLIESFGSACSAVLCILYLCVWVIFSGGGLVVLSEAVFSYFEKRYFQFYLICXKLFS

SEQ ID NO: 4023 - protein, 92 aa, Homo sapiens
MKLCVTVLSLLMLVAAFCSPALSAPMGSDPPTACCFSYTARKLPRNFVVDYYETSSLCSQPAVVFQTKRSKQVCADPSESWVQEYVYDLELN

SEQ ID NO: 4024 - protein, 324 aa, Homo sapiens
MSVEDGGMPGLGRPRQARWTLMLLLSTAMYGAHAPLLALCHVDGRVPFRPSSAVLLTELTKLLLCAFSLLVGWQAWPQGPPPWRQAAPFALSALLYGANNNLVIYLQRYMDPSTYQVLSNLKIGSTAVLYCLCLRHRLSVRQGLALLLLMAAGACYAAGGLQVPGNTLPSPPPAAAASPMPLHITPLGLLLLILYCLISGLSSVYTELLMKRQRLPLALQNLFLYTFGVLLNLGLHAGGGSGPGLLEGFSGWAALVVLSQALNGLLMSAVMKHGSSITRLFVVSCSLVVNAVLSAVLLRLQLTAAFFLATLLIGLAMRLYYGSR

SEQ ID NO: 4025 - protein, 117 aa, Homo sapiens
MITSSFLALWWHVCVCICIYTHIYINTQTHIYTNTRIHFRPQFLAHNSHSPCYTLLLQHWVCQASGDNHSNLLPFLLPAQDRTLIFPTFLMVGHKTHSRDGPTPYPARRNAAVMKLP

SEQ ID NO: 4026 - protein, 113 aa, Homo sapiens
  SITE (73): Xaa equals any amino acid
  SITE (79): Xaa equals any amino acid
  SITE (80): Xaa equals any amino acid
  SITE (82): Xaa equals any amino acid
  SITE (92): Xaa equals any amino acid
  SITE (93): Xaa equals any amino acid
  SITE (98): Xaa equals any amino acid
  SITE (111): Xaa equals any amino acid
MYLSFQINMLFILLFMTTSLKYNSHAIHFTHLKCIIRPGVVAHVCNPSSLGGQGPQILSPGVQDHPGQQAKPXLYFLKXXNXPQWHAPVVPXXQEAEXGGSLKPGKSKPAXEP

SEQ ID NO: 4027 - protein, 161 aa, Homo sapiens
MYLSGFLSSFLMKPINKCIGRNMTYFSGLLVILAFAAWVALAEGLGVAVYAAAVLLGAGCATILVTSLAMTADLIGPHTNSGAFVYGSMSFLDKVANGLAVMAIQSLHPCPSELCCRACVSFYHWAMVAVTGGVGVAAALCLCSLLLWPTRLRRWDRDARP

SEQ ID NO: 4028 - protein, 93 aa, Homo sapiens
  SITE (32): Xaa equals any amino acid
MQRCQSILKVLFFWKQSLASLPSLVCSGAIMXPCSLDLLGSSNPPTSASQVAGTTDACHYVWLIFKFFVEASSHHIAQAGLDLLSSSKNTDFD

SEQ ID NO: 4029 - protein, 145 aa, Homo sapiens [sequence omitted]

SEQ ID NO: 4030 - protein, 145 aa, Homo sapiens [sequence omitted]

SEQ ID NO: 4031 - protein, 74 aa, Homo sapiens
MAVVPTWCSTVLLTLCPQLAWWQVWRMCRYTTGKMPSSPSISPPSSRVPGSLMGKSSRVTSRRARWNLGPCGTV

SEQ ID NO: 4032 - protein, 276 aa, Homo sapiens
MGLLLLVPLLLLPGSYGLPFYNGFYYSNSANDQNLGNGHGKDLLNGVKLVVETPEETLFTYQGASVILPCRYRYEPALVSPRRVRVKWWKLSENGAPEKDVLVAIGLRHRSFGDYQGRVHLRQDKEHDVSLEIQDLRLEDYGRYRCEVIDGLEDESGLVELELRGVVFPYQSPNGRYQFNFHEGQQVCAEQLRWWPPLSSSSGPGRRAWTGATRAGCRMPRCSTPSCCPGSPAVAQAWHLACEATAPATAACTAMMYSASLLPSRGGCTTWSTLRS

SEQ ID NO: 4033 - protein, 209 aa, Homo sapiens
MASMGLQVMGIALAVLGWLAVMLCCALPMWRVTAFIGSNIVTSQTIWEGLWMNCVVQSTGQMQCKVYDSLLALPQDLQAARALVIISIIVAALGVLLSVVGGKCTNCLEDESAKAKTMIVAGVVFLLAGLMVIVPVSWTAHNIIQDFYNPLVASGQKREMGASLYVGWAASGLLLLGGGLLCCNCPPRTDKPYSAKYSAARSAAASNYV

SEQ ID NO: 4034 - protein, 103 aa, Homo sapiens
MLFSLNYFLFIIVFSFCEFFYAHTKCFSSGPLVFAGPIFMNHREQALARLRSHPAQLKHKRDKHKGIWSSLSPRWDTFPISSTHLNFVSGKMHKPDSSTLLLS

SEQ ID NO: 4035 - protein, 41 aa, Homo sapiens
MIRKSFSITVSSLVMLIAWNWGTWSSIACPKAKATKSVQKK

SEQ ID NO: 4036 - protein, 249 aa, Homo sapiens
  SITE (201): Xaa equals any amino acid
  SITE (209): Xaa equals any amino acid
  SITE (214): Xaa equals any amino acid
  SITE (220): Xaa equals any amino acid
  SITE (222): Xaa equals any amino acid
RRRFKMRCLTTPMLLRALAQAARAGPPGGRSLHSSAVAATYKYVNMQDPEMDMKSVTDRAARTLLWTELFRGLGMTLSYLFREPATINYPFEKGPLSPRFRGEHALRRYPSGEERCIACKLCEAICPAQAITIEAEPRADGSRRTTRYDIDMTKCIYCGFCQEACPVDAIVEGPNFEFSTETHEELLYNKEKLLNNGDKWXGRDRPPTXRLTTXIGDAPXAXSPCCPIKPLRPQKKKKKKKKKKKKKRP

SEQ ID NO: 4037 - protein, 156 aa, Homo sapiens; identical to SEQ ID NO: 3387

SEQ ID NO: 4038 - protein, 148 aa, Homo sapiens
  SITE (28): Xaa equals any amino acid
  SITE (135): Xaa equals any amino acid
  SITE (139): Xaa equals any amino acid
MLGLWGQRLPAAWVLLLLPFLPLLLLAXPAPHRASYKPVIVVHGLFDSSYSFRHLLEYINETHPGTVVTVLDLFDGRESLRPLWEQVQGFREAVVPIMAKAPQGVHLICYSQGALCAGLCFLSWMITTWILSSPXLSRXKLGSEKPCF

SEQ ID NO: 4039 - protein, 230 aa, Homo sapiens
  SITE (43): Xaa equals any amino acid
MTGKHAGNPVYKTHKRVGRGSATSLDGCFPPAKTTTGEPSRSXLGNMKSVLLLTTLLVPAHLVAAWSNNYAVDCPQHCDSSECKSSPRCKRTVLDDCGCCRVCAAGRGETCYRTVSGMDGMKCGPGLRCQPSNGEDPFGEEFGICKDCPYGTFGMDCRETCNCQSGICDRGTGKCLKFPFFQYSVTKSSNRFVSLTEHDMASGDGNIVREEVVKENAAGSPVMRKWLNPR

SEQ ID NO: 4040 - protein, 322 aa, Homo sapiens
MARCFSLVLLLTSIWTTRLLVQGSLRAEELSIQVSCRIMGITLVSKKANQQLNFTEAKEACRLLGLSLAGKDQVETALKASFETCSYGWVGDGFVVISRISPNPKCGKNGVGVLIWKVPVSRQFAAYCYNSSDTWTNSCIPEIITTKDPIFNTQTATQTTEFIVSDSTYSVASPYSTIPAPTTTPPAPASTSIPRRKKLICVTEVFMETSTMSTETEPFVENKAAFKNEAAGFGGVPTALLVLALLFFGAAAGLGFCYVKRYVKAFPFTNKNQQKEMIETKVVKEEKANDSNPNEESKKTDKNPEESKSPSKTTVRCLEAEV

SEQ ID NO: 4041 - protein, 249 aa, Homo sapiens
MAAVSLRLGDLVWGKLGRYPPWPGKIVNPPKDLKKPRGKKCFFVKFFGTEDHAWIKVEQLKPYHAHKEEMIKINKGKRFQQAVDAVEEFLRRAKGKDQTSSHNSSDDKNRRNSSEERSRPNSGDEKRKLSLSEGKVKKNMGEGKKRVSSGSSERGSKSPLKRAQEQSPRKRGRPPKDEKDLTIPESSTVKGMMAGPMAAFKWQPTASEPVKDADPHFHHFLLSQTEKPAVCYQAITKKLKICEDLLLPR

SEQ ID NO: 4042 - protein, 94 aa, Homo sapiens
MIMLTLIASFVAVNSFLLSFSQVCDNLTKMNEMGGVWWLTLGIPALWEAVLGRSLELMSSRPTWATWQNLVSTKNTKISQAWWCTPVVPATWEA

SEQ ID NO: 4043 - protein, 46 aa, Homo sapiens
MQVFLGILLILVFCERGGLGSSQTGTPSPRFSRVNITPLMQPQPIA

SEQ ID NO: 4044 - protein, 374 aa, Homo sapiens
  SITE (171): Xaa equals any amino acid
  SITE (183): Xaa equals any amino acid
  SITE (246): Xaa equals any amino acid
  SITE (324): Xaa equals any amino acid
MWFLTTLLLWVPVDGQVDTTKAVITLQPPWVSVFQEETVTLHCEVLHLPGSSSTQWFLNGTATQTSTPSYRITSASVNDSGEYRCQRGLSGRSDPIQLEIHRGWLLLQVSSRVFTEGEPLALRCHAWKDKLVYNVLYYRNGKAFKFFHWNSNLTILKTNISHNGTYHCSGXGKHRYTSAGISXTVKELFPAPVLNASVTSPLLEGNLVTLSCETKLLLQRPGLQLYFSFYMGSKTLRGRNTSSEYXILTARREDSGLYWCEAATEDGNVLKRSPELELQVLGLQLPTPVWFHVLFYLAVGIMFLVNTVLWVTIRKELKRKKKWXLEISLDSGHEKKVISSLQEDRHLEEELKCQEQKEEQLQEGVHRKEPQGAT

SEQ ID NO: 4045 - protein, 273 aa, Homo sapiens
  SITE (10): Xaa equals any amino acid
  SITE (78): Xaa equals any amino acid
  SITE (214): Xaa equals any amino acid
  SITE (231): Xaa equals any amino acid
  SITE (238): Xaa equals any amino acid
  SITE (244): Xaa equals any amino acid
  SITE (248): Xaa equals any amino acid
  SITE (264): Xaa equals any amino acid
MASLQMRGNXGSHFCGGTLIHPSFVLTAAHCLRDIPQRLVNVVLGAHNVRTQEPTQQHFSVAQVFLNNYDAENKLNDXLLIQLSSPANLSASVATVQLPQQDQPVPHGTQCLAMGWGRVGAHDPPAQVLQELNVTVVTFFCRPHNICTFVPRRKAGICFGDSGGPLICDGIIQGIDSFVIWGCATRLFPDFFTRVALYVDWIRSTLRRVEAKGXPWNRPSHSAGRGPRAWXPNPRGGXLGQKQXFPRXMLAFREGPNRSPKIPXQGGFGEKRP

SEQ ID NO: 4046 - protein, 163 aa, Homo sapiens
MKWKALFTAAILQAQLPITEAQSFGLLDPKLCYLLDGILFIYGVILTALFLRVKFSRSADAPAYQQGQNQLYNELNLGRREEYDVLDKRRGRDPEMGGKPRRKNPQEGLYNELQKDKMAEAYSEIGMKGERRRGKGHDGLYQGLSTATKDTYDALHMQALPPR

SEQ ID NO: 4047 - protein, 134 aa, Homo sapiens
  SITE (113): Xaa equals any amino acid
  SITE (133): Xaa equals any amino acid
  SITE (134): Xaa equals any amino acid
MFFLEPGCFGAKLSSHARETTTSGMSAAICSGAAATSSALAWSGSAWACRATRRMAARMARVLMAGVTDPLARQGDQRGQTAVLCPRSSIARSSRAQVDFPYLKVFLVPNSCXTGDPLVLERPPPRWSSGFCXX

SEQ ID NO: 4048 - protein, 99 aa, Homo sapiens
MRKANTVASVLLDVALGLMLLSWLHGRSRIGHLADALVPVADHVAEELQHLLQWLMGAPAGLKMNRALDQVLGRFFLYHIHLWISECRAGGGPRDPRAC

SEQ ID NO: 4049 - protein, 280 aa, Homo sapiens
MAPSGSLAVPLAVLVLLLWGAPWTHGRRSNVRVITDENWRELLEGDWMIEFYAPWCPACQNLQPEWESFAEWGEDLEVNIAKVDVTEQPGLSGRFIITALPTIYHCEDGEFRRYQGPRTKKDFINFISDKEWKSIEPVSSWFGPGSVLMSSMSALFQLSMWIRTCHNYFIEDLGLPVWGSYTVFALATLFSGLLLGLCMIFVADCLCPSKRRRPQPYPYPSKKLLSESAQPLKKVEEEQEADEEDVSEEEAESKEGTNKDFPQNAIRQRSLGPSLATDKS

SEQ ID NO: 4050 - protein, 404 aa, Homo sapiens
MSILILTFLLFSLHLEYCGTFCYPNVSQSPYLRTVGEKLLPGIEVLWTGPKVVSKEIPVESIEEVSKIIKRAPVIWDNIHANDYDQKRLFLGPYKGRSTELIPRLKGVLTNPNCEFEANYVAIHTLATWYKSNMNGVRKDVVMTDSEDSTVSIQIKLENEGSDEDIETDVLYSPQMALKLALTEWLQEFGVPHQYSSRQVAHSGAKASVVDGTPLVAAPSLNATTVVTTVYQEPIMSQGAALSGEPTTLTKEEEKKQPDEEPMDMVVEKQEETDHKNDNQILSEIVEAKMAEELKPMDTDKESIAESKSPEMSMQEDCISDIAPMQTDEQTNKEQFVPGPNEKPLYTAEPVTLEDLQLLADLFYLPYEHGPKGAQMLREFQWLRANSSVVSVNCKGKDSEKKKK

SEQ ID NO: 4051 - protein, 87 aa, Homo sapiens
MVSFSFLFFFFSFFETRSHSVTQAGMQWHNHSSLQPYPPGLKQSSHLSLPSRWDYRCVPPQLLTFCIFCRDRVSPCCPGWSKTPGLK

SEQ ID NO: 4052 - protein, 55 aa, Homo sapiens
MLHCSHSHFRSNLFPHPFLLSTIVLGLVLCVGAALGPVKVRIGKQIWIQGLILSL

SEQ ID NO: 4053 - protein, 103 aa, Homo sapiens
  SITE (98): Xaa equals any amino acid
  SITE (103): Xaa equals any amino acid
MVASMPLCLLKDLLLLLSFHPSLADDPEPSDDGILLAREKDLTRLLNLNSFRLYFNFFFFVQVLILIHFNMLLSKKKKKKGGRSRGSLEGPKLTRACXVIALX

SEQ ID NO: 4054 - protein, 323 aa, Homo sapiens
MQAAWLLGALVVPQLLGFGHGARGAEREWEGGWGGAQEEEREREALMLKHLQEALGLPAGRGDENPAGTVEGKEDWEMEEDQGEEEEEEATPTPSSGPSPSPTPEDIVTYILGRLAGLDAGLHQLHVRLHALDTRVVELTQGLRQLRNAAGDTRDAVQALQEAQGRAEREHGRLEGCLKGLRLGHKCFLLSRDFEAQAAAQARCTARGGSLAQPADRQQMEALTRYLRAALAPYNWPVWLGVHDRRAEGLYLFENGQRVSFFAWHRSPRPELGAQPSASPHPLSPDQPNGGTLENCVAQASDDGSWWDHDCQRRLYYVCEFPF

SEQ ID NO: 4055 - protein, 742 aa, Homo sapiens
MGGRVFLAFCVWLTLPGAETQDSRGCARWCPQNSSCVNATACRCNPGFSSFSEIITTPTETCDDINECATPSKVSCGKFSDCWNTEGSYDCVCSPGYEPVSGAKTFKNESENTCQDVDECSSGQHQCDSSTVCFNTVGSYSCRCRPGWKPRHGIPNNQKDTVCEDMTFSTWTPPPGVHSQTLSRFFDKVQDLGRDSKTSSAEVTIQNVIKLVDELMEAPGDVEALAPPVRHLIATQLLSNLEDIMRILAKSLPKGPFTYISPSNTELTLMIQERGDKNVTMGQSSARMKLNWAVAAGAEDPGPAVAGILSIQNMTTLLANASLNLHSKKQAELEEIYESSIRGVQLRRLSAVNSIFLSHNNTKELNSPILFAFSHLESSDGEAGRDPPAKDVMPGPRQELLCAFWKSDSDRGGHWATEGCQVLGSKNGSTTCQCSHLSSFAILMAHYDVEDWKLTLITRVGLALSLFCLLLCILTFLLVRPIQGSRTTIHLHLCICLFVGSTIFLAGIENEGGQVGLRCRLVAGLLHYCFLAAFCWMSLEGLELYFLVVRVFQGQGLSTRWLCLIGYGVPLLIVGVSAAIYSKGYGRPRYCWLDFEQGFLWSFLGPVTFIILCNAVIFVTTVWKLTQKFSEINPDMKKLKKARALTITAIAQLFLLGCTWVFGLFIFDDRSLVLTYVFTILNCLQGAFLYLLHCLLNKKVREEYRKWACLVAGGSKYSEFTSTTSGTGHNQTRALRASESGI

SEQ ID NO: 4056 - protein, 107 aa, Homo sapiens
IFGCGLALPPVFAAELLYLTRACASDEQPFITALRPPPRPPPSALQFISRLVPIATCGLGGPPDILSFGSPVTPELLPFWGAHICDTLVCPVHFLHLEFLSCSHISI

SEQ ID NO: 4057 - protein, 116 aa, Homo sapiens
  SITE (89): Xaa equals any amino acid
MSCYLIVVLICISLMISDVEHLFICTLAICMSAFETCLFKYFDHFLNGLLDFFPLELSELLIYSGYQSFVRWVVCKYFLSFCGLSLHFXACFLCCAKAFYLDVITFAYFCFGCLCL

SEQ ID NO: 4058 - protein, 161 aa, Homo sapiens
  SITE (161): Xaa equals any amino acid
MEMGAAKVWGEVGRWLVIALIQLAKAVLRMLLLLWFKAGLQTSPPIVPLDRETQAQPPDGDHSPGNHEQSYVGKRSNRVVRTLQNTPSLHSRHWGAPQQREGRQQQHHEELSATPTPLGLQETIAEFLYIARPLLHLLSLGLWGQRSWKPWLLAGVVDVTX

SEQ ID NO: 4059 - protein, 37 aa, Homo sapiens
MQEARQQITTVVLPTLAVVVLLIVVFVYVATRPTITE

SEQ ID NO: 4060 - protein, 1523 aa, Homo sapiens
MAPGWAGVGAAVRARLALALALASVLSGPPAVACPTKCTCSAASVDCHGLGLRAVPRGIPRNAERLDLDRNNITRITKMDFAGLKNLRVLHLEDNQVSVIERGAFQDLKQLERLRLNKNKLQVLPELLFQSTPKLTRLDLSENQIQGIPRKAFRGITDVKNLQLDNNHISCIEDGAFRALRDLEILTLNNNNISRILVTSFNHMPKIRTLRLHSNHLYCDCHLAWLSDWLRQRRTVGQFTLCMAPVHLRGFNVADVQKKEYVCPAPHSEPPSCNANSISCPSPCTCSNNIVDCRGKGLMEIPANLPEGIVEIRLEQNSIKAIPAGAFTQYKKLKRIDISKNQISDIAPDAFQGLKSLTSLVLYGNKITEIAKGLFDGLVSLQLLLLNANKINCLRVNTFQDLQNLNLLSLYDNKLQTISKGLFAPLQSIQTLHLAQNPFVCDCHLKWLADYLQDNPIETSGARCSSPRRLANKRISQIKSKKFRCSGSEDYRSRFSSECFMDLVCPEKCRCEGTIVDCSNQKLVRIPSHLPEYVTDLRLNDNEVSVLEATGIFKKLPNLRKINLSNNKIKEVREGAFDGAASVQELMLTGNQLETVHGRVFRGLSGLKTLMLRSNLIGCVSNDTFAGLSSVRLLSLYDNRITTITPGAFTTLVSLSTINLLSNPFNCNCHLAWLGKWLRKRRIVSGNPRCQKPFFLKEIPIQDVAIQDFTCDGNEESSCQLSPRCPEQCTCMETVVRCSNKGLRALPRGMPKDVTELYLEGNHLTAVPRELSALRHLTLIDLSNNSISMLTNYTFSNMSHLSTLILSYNRLRCIPVHAFNGLRSLRVLTLHGNDISSVPEGSFNDLTSLSHLALGTNPLHCDCSLRWLSEWVKAGYKEPGIARCSSPEPMADRLLLTTPTHRFQCKGPVDINIVAKCNACLSSPCKNNGTCTQDPVELYRCACPYSYKGKDCTVPINTCIQNPCQHGGTCHLSDSHKDGFSCSCPLGFEGQRCEINPDDCEDNDCENNATCVDGINNYVCICPPNYTGELCDEVIDHCVPELNLCQHEAKCIPLDKGFSCECVPGYSGKLCETDNDDCVAHKCRHGAQCVDTINGYTCTCPQGFSGPFCEHPPPMVLLQTSPCDQYECQNGAQCIVVQQEPTCRCPPGFAGPRCEKLITVNFVGKDSYVELASAKVRPQANISLQVATDKDNGILLYKGDNDPLALELYQGHVRLVYDSLSSPPTTVYSVETVNDGQFHSVELVTLNQTLNLVVDKGTPKSLGKLQKQPAVGINSPLYLGGIPTSTGLSALRQGTDRPLGGFHGCIHEVRINNELQDFKALPPQSLGVSPGCKSCTVCKHGLCRSVEKDSVVCECRPGWTGPLCDQEARDPCLGHRCHHGKCVATGTSYMCKCAEGYGGDLCDNKNDSANACSAFKCHHGQCHISDQGEPYCLCQPGFSGEHCQQENPCLGQVVREVIRRQKGYASCATASKVPIMECRGGCGPQCCQPTRSKRRKYVFQCTDGSSFVEEVERHLECGCLACS

SEQ ID NO: 4061 - protein, 113 aa, Homo sapiens
MKVSVAALSCLMLVAVLGSQAQFTNDAETELMMSKLPLENPVVLNSFHFAADCCTSYISQSIPCSLMKSYFETSSECSKPGVIFLTKKGRQVCAKPSGPGVQDCMKKLKPYSI

SEQ ID NO: 4062 - protein, 63 aa, Homo sapiens
MPSFIVFLASLLLAQYHFGSVPQCGAKHCLSHSDILQNLRAEVNVEQKFSPSLKPQGLEPPLE

SEQ ID NO: 4063 - protein, 247 aa, Homo sapiens
MHLARLVGSCSLLLLLGALSGWAASDDPIEKVIEGINRGLSNAEREVGKALDGINSGITHAGREVEKVFNGLSNMGSHTGKELDKGVQGLNHGMDKVAHEINHGIGQAGKEAGQLGQGVHHTLEQAGKEADKAVQGFHTGVHQAGKEAEKLGQGVNHAADQAGKEVEKLGQGAHHAAGQAGKELQNAHNGVNQASKEANQLLNGNHQSGSSSHQGGATTTPLASGASVNTPFINLPALWRSVANIMP

SEQ ID NO: 4064 - protein, 237 aa, Homo sapiens
MNPTLGLAIFLAVLLTVKGLLKPSFSPRNYKALSEVQGWKQRMAAKELARQNMDLGFKLLKKLAFYNPGRNIFLSPLSISTAFSMLCLGAQDSTLDEIKQGFNFRKMPEKDLHEGFHYIIHELTQKTQDLKLSIGNTLFIDQRLQPQRKFLEDAKNFYSAETILTNFQNLEMAQKQINDFISQKTHGKINNLIENIDPGTVMLLANYIFFRARWKHEFDPNVTKEEDSLLHRCLQNL

SEQ ID NO: 4065 - protein, 390 aa, Homo sapiens
MISLPGPLVTNLLRFLFLGLSALAPPSRAQLQLHLPANRLQAVEGGEVVLPAWYTLHGEVSSSQPWEVPFVMWFFKQKEKEDQVLSYINGVTTSKPGVSLVYSMPSRNLSLRLEGLQEKDSGPYSCSVNVQDKQGKSRGHSIKTLELNVLVPPAPPSCRLQGVPHVGANVTLSCQSPRSKPAVQYQWDRQLPSFQTFFAPALDVIRGSLSLTNLSSSMAGVYVCKAHNEVGTAQCNVTLEVSTGPGAAVVAGAVVGTLVGLGLLAGLVLLYHRRGKALEEPANDIKEDAIAPRTLPWPKSSDTISKNGTLSSVTSARALRPPHGPPRPGALTPTPSLSSQALPSPRLPTTDGAHPQPISPIPGGVSSSGLSRMGAVPVMVPAQSQAGSLV

SEQ ID NO: 4066 - protein, 484 aa, Homo sapiens
MPVQLTTALRVVGTSLFALAVLGGILAAYVTGYQFIHTEKHYLSFGLYGAILGLHLLIQSLFAFLEHRRMQRAGQALKLPSPRRGSVALCIAAYQEDPDYLRKCLRSAQRISFPDLKVVMVVDGNRQEDAYMLDIFHEVLGGTEQAGFFVWRSNFHEAGEGETEASLQEGMDRVRDVVRASTFSCIMQKWGGKREVMYTAFKALGDSVDYIQVCDSDTVLDPACTIEMLRVLEEDPQVGGVGGDVQILNKYDSWISFLSSVRYWMAFNVERACQSYFGCVQCISGPLGMYRNSLLQQFLEDWYHQKFLGSKCSFGDDRHLTNRVLSLGYRTKYTARSKCLTETPIKYLRWLNQQTRWSKSYFREWLYNSLWFHKHHLWMTYESVVTGFFPFFLIATVIQLFYRGRIWNILLFLLTVQLVGIIKATYACFLRGNAEMIFMSLYSLLYMSSLLPAKIFAIATINKSGWGTSGRKTKKKKKKKKKKK

SEQ ID NO: 4067 - protein, 167 aa, Homo sapiens
MLLSLAAFSVISVVSYLILALLSVTISFRIYKSVIQAVQKSEEGHPFKAYLDVDITLSSEAFHNYMNAAMVHINRALKLIIRLFLVEDLVDSLKLAVFMWLMTYVGAVFNGITLLILAELLIFSVPIVYEKYKTQIDHYVGIARDQTKSIVEKIQAKLPGIAKKKAE

SEQ ID NO: 4068 - protein, 110 aa, Homo sapiens
MRFMTLLFLTALAGALVCAYDPEAASAPGSGNPCHEASAAQKENAGEDPGLARQAPKPRKQRSSLLEKGLDGAKKAVGGLGKLGKDAVEDLESVGKGAVHDVKDVLDSVL

SEQ ID NO: 4069 - protein, 376 aa, Homo sapiens
MQWTSLLLLAGLFSLSQAQYEDDPHWWFHYLRSQQSTYYDPYDPYPYETYEPYPYGVDEGPAYTYGSPSPPDPRDCPQECDCPPNFPTAMYCDNRNLKYLPFVPSRMKYVYFQNNQITSIQEGVFDNATGLLWIALHGNQITSDKVGRKVFSKLRHLERLYLDHNNLTRMPGPLPRSLRELHLDHNQISRVPNNALEGLENLTALYLQHNEIQEVGSSMRGLRSLILLDLSYNHLRKVPDGLPSALEQLYMEHNNVYTVPDSYFRGAPKLLYVRLSHNSLTNNGLASNTFNSSSLLELDLSYNQLQKIPPVNTNLENLYLQGNRINEFSISSFCTVVDVVNFSKLQVLRLDGNEIKRSAMPADAPLCLRLASLIEI

SEQ ID NO: 4070 - protein, 85 aa, Homo sapiens
MKIPVLPAVVLLSLLVLHSAQGATLGGPEEESTIENYASRPEAFKADEFLNWHALFESIKRKLPFLNWDAFPKLKGLRSATPDAQ

SEQ ID NO: 4071 - protein, 93 aa, Homo sapiens
MSFSFIIFLLLVCQEITFCMSYGDAVNCFSECFSNLQTIYISCLQHAVCKHSVIWSIQLFVRALPISKCAELSIDGIFRSFHENWKCSWVAPT

SEQ ID NO: 4072 - protein, 449 aa, Homo sapiens
MSPATTGTFLLTAFLLSCADGINGTVNWKTRQANNFIISRKMAAGMKDVYSIFSKVHSDRNVYPSAGVLFVHVLEREYFKGEFPPYPKPGEISNDPITFNTNLMGYPDRPGWLRYIQRTPYSDGVLYGSPTAENVGKPTIIEITAYNRRTFETARHNLIINIMSAEDFPLPYQAEFFIKNMNVEEMLASEVLGDFLGAVKNVWQPERLNAINITSALDRGGRVPLPINDLKEGVYVMVGADVPFSSCLREVENPQNQLRCSQEMEPVITCDKKFRTQFYIDWCKISLVDKTKQVSTYQEVIRGEGILPDGGEYKPPSDSLKSRDYYTDFLITLAVPSAVALVLFLILAYIMCCRREGVEKRNMQTPDIQLVHHSAIQKSTKELRDMSKNREIAWPLSTLPVFHPVTGEIIPPLHTDNYDSTNMPLMQTQQNLPHQTQIPQQQTTGKWYP

SEQ ID NO: 4073 - protein, 78 aa, Homo sapiens [sequence omitted]

SEQ ID NO: 4074 - protein, 187 aa, Homo sapiens
  SITE (180): Xaa equals any amino acid
MGLFRGFVFLLVLCLLHQSNTSFIKLNNNGFEDIVIVIDPSVPEDEKIIEQIEDMVTTASTYLFEATEKRFFFKNVSILIPENWKENPQYKRPKHENHKHADVIVAPPTLPGRDEPYTKQFTECGEKGEYIHFTPDLLLGKKQNEYGPPGKLFVHEWAHLRWGVFDEYNEDQPFYRAKSXKKKKGGR

SEQ ID NO: 4075 - protein, 167 aa, Homo sapiens; identical to SEQ ID NO: 3689

SEQ ID NO: 4076 - protein, 281 aa, Homo sapiens
MYREVCSIRFLFTAVSLLSLFLSAFWLGLLYLVSPLENEPKEMLTLSEYHERVRSQGQQLQQLQAELDKLHKEVSTVRAANSERVAKLVFQRLNEDFVRKPDYALSSVGASIDLQKTSHDYADRNTAYFWNRFSFWNYARPPTVILEPHVFPGNCWAFEGDQGQVVIQLPGRVQLSDITLQHPPPSVEHTGGANSAPRDFAVFGLQVYDETEVSLGKFTFDVEKSEIQTFHLQNDPPAAFPKVKIQILSNWGHPRFTCLYRVRAHGVRTSEGAEGSAQGPH

SEQ ID NO: 4077 - protein, 237 aa, Homo sapiens
MKGILVAGITAVLVAAVESLSCVQCNSWEKSCVNSIASECPSHANTSCISSSASSSLETPVRLYQNMFCSAENCSEETHITAFTVHVSAEEHFHFVSQCCQGKECSNTSDALDPPLKNVSSNAECPACYESNGTSCRGKPWKCYEEEQCVFLVAELKNDIESKSLVLKGCSNVSNATCQFLSGENKTLGGVIFRKFECANVNSLTPTSAPTTSHNVGSKASLYLLALASLLLRGLLP

SEQ ID NO: 4078 - protein, 205 aa, Homo sapiens
MIMLFIMFYSKNISLMMNFQPPSKAWRASQMMTFFIFLLFFPSFTGVLCTLAITIWRLKPSADCGPFRGLPLFIHSIYSWIDTLSTRPGYLWVVWIYRNLIGSVHFFFILTLIVLIITYLYWQITEGRKIMIRLLHEQIINEGKDKMFLIEKLIKLQDMEKKANPSSLVLERREVEQQGFLHLGEHDGSLDLRSRRSVQEGNPRA

SEQ ID NO: 4079 - protein, 259 aa, Homo sapiens
MAPAEARGALPGWISVLGWGLALCSLCGAGPLWSGSHEWKKLILTQHWPPTVCKEVNSCQDSLDYWTIHGLWPDRAEDCNQSWHFNLDEIKDLLRDMKIYWPDVIHRSSNRSQFWKHEWVKHGTCAAQVDALNSEKKYFGKSLDLYKQIDLNSVLQKFGIKPSINYYQLADFKDALTRIYGVVPKIQCLMPEQGESVQTVGQIELCFTKEDLHLRNCTEPGEQLSSRQEAWLAMEASTHGMMVCEDGPIFYPPPTKTQH

SEQ ID NO: 4080 - protein, 140 aa, Homo sapiens
MASPLRSLLFLLAVLAVAWAATPKQGPRMLGAPEEADANEEGVRRALDFAVSEYNKGSNDAYHSRAIQVVRARKQLVAGVNYFLDVEMGRTTCTKSQTNLTDCPFHDQPHLMRKALCSFQIYSVPWKGTHSLTKFSCKNA

SEQ ID NO: 4081 - protein, 311 aa, Homo sapiens
MKALWAVLLVTLLTGCLAEGEPEVTDQLEWQSNQPWEQALNRFWDYLRWVQTLSDQVQEELQSSQVTQELTALMEDTMTEVKAYKKELEEQLGPVAEETRARLGKEVQAAQARLGADMEDLRNRLGQYRNEVHTMLGQSTEEIRARLSTHLRKMRKRLMRDADDLQKRLAVYKAGAREGAERGVSAIRERLGPLVEQGRQRTANLGAGAAQPLRDRAQAFGDRIRGRLEEVGNQARDRLEEVREHMEEVRSKMEEQTQQIRLQAEIFQARLKGWFEPIVEDMHRQWANLMEKIQASVATNPIITPVAQENQ

SEQ ID NO: 4082 - protein, 285 aa, Homo sapiens
MIPWVLLACALPCAADPLLGAFARRDFRKGSPQLVCSLPGPQGPPGPPGAPGPSGMMGRMGFPGKDGQDGHDGDRGDSGEEGPPGRTGNRGKPGPKGKAGAIGRAGPRGPKGVNGTPGKHGTPGKKGPKGKKGEPGLPGPCSCGSGHTKSAFSVAVTKSYPRERLPIKFDKILMNEGGHYNASSGKFVCGVPGIYYFTYDITLANKHLAIGLVHNGQYRIRTFDANTGNHDVASGSTILALKQGDEVWLQIFYSEQNGLFYDPYWTDSLFTGFLIYADQDDPNEV

SEQ ID NO: 4083 - protein, 33 aa, Homo sapiens
MFLTMSKWLQWLALALYIKGQLTDILQKSCWLR

SEQ ID NO: 4084 - protein, 94 aa, Homo sapiens
  SITE (23): Xaa equals any amino acid
  SITE (32): Xaa equals any amino acid
  SITE (58): Xaa equals any amino acid
MGRVLYFHHYFPAMLFSSMLTGXLWDTLLRLXAWGLASWPLARGIHVAGILSLLLGTXYSFYLFHPLAYGMVGPLAQDPQSPMAGLRWLDSWDF

SEQ ID NO: 4085 - protein, 134 aa, Homo sapiens
MDTSHTTKSCLLILLVALLCAERAQGLECYQCYGVPFETSCPSITCPYPDGVCVTQEAAVIVDSQTRKVKNNLCLPICPPNIESMEILGTKVNVKTSCCQEDLCNVAVPNGGSTWTMAGVLLFSLSSVLLQTLL

SEQ ID NO: 4086 - protein, 268 aa, Homo sapiens
MLLWSLLVIFDAVTEQADSLTLVAPSSVFEGDSIVLKCQGEQNWKIQKMAYHKDNKELSVFKKFSDFLIQSAVLSDSGNYFCSTKGQLFLWDKTSNIVKIKVQELFQRPVLTASSFQPIEGGPVSLKCETRLSPQRLDVQLQFCFFRENQVLGSGWSSSPELQISAVWSEDTGSYWCKAETVTHRIRKQSLQSQIHVQRIPISNVSLEIRAPGGQVTEGQKLILLCSVAGGTGNVTFFLVQRGHRNQYGKENPAFPVSRAGDPSCERE

SEQ ID NO: 4087 - protein, 183 aa, Homo sapiens [sequence omitted]

SEQ ID NO: 4088 - protein, 133 aa, Homo sapiens
  SITE (91): Xaa equals any amino acid
  SITE (94): Xaa equals any amino acid
  SITE (96): Xaa equals any amino acid
MWCIVLFSLLAWVYAEPTMYGEILSPNYPQAYPSEVEKSWDIEVPEGYGIHLYFTHLDIELSENCAYDSVQIISGDTEEGRLCGQRSSNNXQSXIXGKKFQGPITTKLQGEPLKSRTFFQMERSGFYGGFGLE

SEQ ID NO: 4089 - protein, 199 aa, Homo sapiens
MANRGPAYGLSREVQQKIEKQYDADLEQILIQWITTQCRKDVGRPQPGRENFQNWLKDGTVLCELINALYPEGQAPVKKIQASTMAFKQMEQISQFLQAAERYGINTTDIFQTVDLWEGKNMACVQRTLMNLGGLAVARDDGLFSGDPNWFPKKSKENPRNFSDNQLQEGKNVIGLQMGTNRGASQAGMTGYGMPRQIL

SEQ ID NO: 4090 - protein, 266 aa, Homo sapiens
AQPVPAVRPQRARERLLPMPTWILVLSLSLAGALFLLAGLVAVALVVRKVKLRNLQKKRDRESCWAQINFDSTDMSFDNSLFTVSAKTMPEEDPATLDDHSGTTATPSNSRTRKRPTSTSSSPETPEFSTFPGLPVRLRTGGPLCLQAFGGLRSLQLLLGGLCQPLSQGIGQRKGRGTLALGFSSQRSGRGDTGMGLALYRQQEVPLSTSAPQDHQRRRCQDPFLSPSWAIRRPRSLHTRGIPPFPSGFLSIGCPWVCCVSACWLA

SEQ ID NO: 4091 - protein, 104 aa, Homo sapiens
MKPVTASALLLILLGVAWRGDSHSWGSDLSSLQKRAGGADQFSKPEARQDLSADSSKNYYNNQQVNPTYNWQYYTKTTAKAGVTPSSSSASRAQPGLLKWLKFW

SEQ ID NO: 4092 - protein, 74 aa, Homo sapiens
EFGTSGYIFLHLQLPHGVLIRLKSNNGYKNTLKSRHGFLLTAMREFLELDLDGPKQLENWTKDIKKKLFSTIGQ

SEQ ID NO: 4093 - protein, 54 aa, Homo sapiens
MHAPSVLCPSPLPRARSSSVALCPLLYLSVLVWLSRHPPCLCLSSGLSLGPATS

SEQ ID NO: 4094 - protein, 175 aa, Homo sapiens; identical to SEQ ID NO: 3085

SEQ ID NO: 4095 - protein, 175 aa, Homo sapiens; identical to SEQ ID NO: 3085

SEQ ID NO: 4096 - protein, 182 aa, Homo sapiens
LTQGRVAMEKIPVSAFLLLVALSYTLARDTTVKPGAKKDTKDSRPKLPQTLSRGWGDQLIWTQTYEEALYKSKTSNKPLMIIHHLDECPHSQALKKVFAENKEIQKLAEQFVLLNLVYETTDKHLSPDGQYVPRIMFVDPSLTVRADITGRYSNRLYAYEPADTALLLDNMKKALKLLKTEL

SEQ ID NO: 4097 - protein, 414 aa, Homo sapiens
MTKARLFRLWLVLGSVFMILLIIVYWDSAGAAHFYLHTSFSRPHTGPPLPTPGPDRDRELTADSDVDEFLDKFLSAGVKQSDLPRKETEQPPAPGSMEESVRGYDWSPRDARRSPDQGRQQAERRSVLRGFCANSSLAFPTKERAFDDIPNSELSHLIVDDRHGAIYCYVPKVACTNWKRVMIVLSGSLLHRGAPYRDPLRIPREHVHNASAHLTFNKFWRRYGKLSRHLMKVKLKKYTKFLFVRDPFVRLISAFRSKFELENEEFYRKFAVPMLRLYANHTSLPASAREAFRAGLKVSFANFIQYLLDPHTEKLAPFNEHWRQVYRLCHPCQIDYDFVGKLETLDEDAAQLLQLLQVDRQLRFPPSYRNRTASSWEEDWFAKIPLAWRQQLYKLYEADFVLFGYPKPENLLRD

SEQ ID NO: 4098 - protein, 335 aa, Homo sapiens
SRVTFPERRRSSRLAGEHGGERERLRLVPARRPAQPRPGRQQAERRSVLRGFCANSSLAFPTKERAFDDIPNSELSHLIVDDRHGAIYCYVPKVACTNWKRVMIVLSGSLLHRGAPYRDPLRIPREHVHNASAHLTFNKFWRRYGKLSRHLMKVKLKKYTKFLFVRDPFVRLISAFRSKFELENEEFYRKFAVPMLRLYANHTSLPASAREAFRAGLKVSFANFIQYLLDPHTEKLAPFNEHWRQVYRLCHPCQIDYDFVGKLETLDEDAAQLLQLLQVDRQLRFPPSYRNRTASSWEEDWFAKIPLAWRQQLYKLYEADFVLFGYPKPENLLRD

SEQ ID NO: 4099 - protein, 129 aa, Homo sapiens
GLSISREHKVLRPLALFLDVGGEVLVHARVELDRPCLSRGWDYNLRGQNLIQKLLSTEVLSISSFLFLGLFFCSQVFPRILVFALELRFTLMMVAQLCPEDSQAGPGREFRKTVLVNGLQVVTKRVAVR

SEQ ID NO: 4100 - protein, 94 aa, Homo sapiens; identical to SEQ ID NO: 2918

SEQ ID NO: 4101 - protein, 53 aa, Homo sapiens
  SITE (19): Xaa equals any amino acid
  SITE (24): Xaa equals any amino acid
  SITE (25): Xaa equals any amino acid
  SITE (30): Xaa equals any amino acid
TVLLLLALLFQVHLHLQRXAGLQXXLAVLXVSHVVGHDAHKRWRTGRGRRWPG

SEQ ID NO: 4102 - protein, 151 aa, Homo sapiens
  SITE (4): Xaa equals any amino acid
  SITE (35): Xaa equals any amino acid
FRKXGGILSLPSFVKSGQKSSLSSFTSSWALQAEXSWVKPTMSAKRMLTVLVTVHVHGVELLLVLLALVFLHVFQHLVSHVLGQDGKHEVLLLLALLFQVHLHLQRLAGLQEGLAVLAVSHVVGHDAHSDGAQVEEDVGQDSSAWLGRPQE

SEQ ID NO: 4103 - protein, 85 aa, Homo sapiens
  SITE (45): Xaa equals any amino acid
  SITE (76): Xaa equals any amino acid
TKHDSNLIIRLAIQLLISLLGPQEMACHVLRQHVGDQGLVPASHXIDTFLLVVDLNLPQEKCPCQFFYVAGEVVEXSIIGTPSPS

SEQ ID NO: 4104 - protein, 87 aa, Homo sapiens
  SITE (71): Xaa equals any amino acid
  SITE (77): Xaa equals any amino acid
VDMVSHMVKLTLMLLVAGAVATINLYAWRPVFDEYDHKRFREHDLPMVALEQMQGFNPGLNGTDRLPLVPXKYSMTXMVFLMMLSFY

SEQ ID NO: 4105 - protein, 145 aa, Homo sapiens
  SITE (118): Xaa equals any amino acid
  SITE (134): Xaa equals any amino acid
  SITE (143): Xaa equals any amino acid
IWTSPAATAVNKMNLEEQSQQQENLMLSILPKHVADEMLKDMKKDESQKDQQQFNTMYMYRHENVSILFADIVGFTQLSSACSAQELVKLLNELFARFDKLAAKYHQLRIKILGDCYXCICGLPDYRGGPRRLXILMGLAMVXGH

SEQ ID NO: 4106 - protein, 406 aa, Homo sapiens; identical to SEQ ID NO: 2921

SEQ ID NO: 4107 - protein, 267 aa, Homo sapiens; identical to SEQ ID NO: 2920

SEQ ID NO: 4108 - protein, 5 aa, Homo sapiens
GGSFI

SEQ ID NO: 4109 - protein, 209 aa, Homo sapiens
RHILYYEPMKLLILFLSHLLSLAFGILCLSVTVILSLLLSFSKRGFSVRSFGTGTHVKLPGPAPDKPNVYDFKTTYDQMYNDLLRKDKELYTQNGILHMLDRNKRIKPRPERFQNCKDLFDLILTCEERVYDQVVEDLNSREQETCQPVHVVNVDIQDNHEEATLGAFLICELCQCIQHTEDMENEIDELLQEFEEKSGRTFLHTVCFY

SEQ ID NO: 4110 - protein, 17 aa, Homo sapiens
  SITE (2): Xaa equals any amino acid
MXSLSFVPMVKLLSLSS

SEQ ID NO: 4111 - protein, 24 aa, Homo sapiens
LLLLSPAPAWSRLWSFLLFILFPS

SEQ ID NO: 4112 - protein, 129 aa, Homo sapiens
ADLTAVCSAWKPGAKPVGLMTVSYFWWLRVGAWAEDVEALASLPEDRLRWNLLALPASPCAVTALVARHRRAGLQRSIQCLLGRQGGGGCNCELTKPQVGSKWVGHRKKSDLQSGDLGSGLCLMTGSVM

SEQ ID NO: 4113 - protein, 212 aa, Homo sapiens
IIVNNEGQNIIVIVAGANLLLNTEDLRAAANVISRAKVMVCQLEITPATSLEALTMARRSGVKTLFNPAPAIADLDPQFYTLSDVFCCNESEAEILTGLTVGSAADAGEAALVLLKRGCQVVIITLGAEGCVVLSQTEPEPKHIPTEKVKAVDTTGAGDSFVGALAFYLAYYPNLSLEDMLNRSNFIAAVSVQAAGTQSSYPYKKDLPLTLF

SEQ ID NO: 4114 - protein, 13 aa, Homo sapiens
MNTGNTGIILLLF

SEQ ID NO: 4115 - protein, 56 aa, Homo sapiens; identical to SEQ ID NO: 2928

SEQ ID NO: 4116 - protein, 31 aa, Homo sapiens
MILDSRGYLFLEVFFIACVSLSLLSVVLLYW

SEQ ID NO: 4117 - protein, 118 aa, Homo sapiens
MYIYSMCVCIYVCIYTVCAYTYMYVYIQYVRIHVCIHTVCAYTCVYAYSMCVYMYVYIQYVRIHVCMYAYSMCIYMYVCIYTYVYIQSGRNHPTVFKYVMILIRACPSVVYFWEPSNR

SEQ ID NO: 4118 - protein, 181 aa, Homo sapiens
  SITE (175): Xaa equals any amino acid
RDKSWSSTAVAAALELVDPPGCRNSARALEREARSPRSPQTADTSPRPRAPACAPSRARAMPSDRPFKQRRSFADRCKEVQQIRDQHPSKIPVIIERYKGEKQLPVLDKTKFLVPDHVNMSELVKIIRRRLQLNPTQAFFLLVNQHSMVSVSTPIADIYEQEKDEDGFLYMVYAXQETFGF

SEQ ID NO: 4119 - protein, 80 aa, Homo sapiens; identical to SEQ ID NO: 2931

SEQ ID NO: 4120 - protein, 44 aa, Homo sapiens; identical to SEQ ID NO: 2933

SEQ ID NO: 4121 - protein, 2 aa, Homo sapiens
MK

SEQ ID NO: 4122 - protein, 44 aa, Homo sapiens; identical to SEQ ID NO: 2933

SEQ ID NO: 4123 - protein, 44 aa, Homo sapiens; identical to SEQ ID NO: 2933

SEQ ID NO: 4124 - protein, 35 aa, Homo sapiens; identical to SEQ ID NO: 2935

SEQ ID NO: 4125 - protein, 91 aa, Homo sapiens [sequence omitted]

SEQ ID NO: 4126 - protein, 148 aa, Homo sapiens
  SITE (22): Xaa equals any amino acid
  SITE (24): Xaa equals any amino acid
  SITE (123): Xaa equals any amino acid
SRTSGSPGLQEFGTSGQSLCGXLXPQIQACLLPGECGRPLADRAPQEVLHIRAEEEVMPGTGAPAAVSAPGSCLLWALSFVWEGTSMSPTHPAFSFLEASTFLYTQPSLSQAGGPPDPVPLQXSLLGDRATAGTAPSYPNPSFPRFLE

SEQ ID NO: 4127 - protein, 91 aa, Homo sapiens [sequence omitted]

SEQ ID NO: 4128 - protein, 20 aa, Homo sapiens
MSIFLVMSISCSSTSHCYSF

SEQ ID NO: 4129 - protein, 167 aa, Homo sapiens
MATLWGGLLRLGSLLSLSCLALSVLLLAHCQTPPSDCLHVVEPMPVRGPDVEAYCLRCECKYEERSSVTIKVTIIIYLSILGLLLLYMVYLTLVEPILKRRLFGHAQLIQSDDDIGDHQPFANAHDVLARSRSRANVLNKVEYAQQRWKLQVQEQRKSVFDRHVVLS

SEQ ID NO: 4130 - protein, 47 aa, Homo sapiens; identical to SEQ ID NO: 2942

SEQ ID NO: 4131 - protein, 5 aa, Homo sapiens
YMFFI

SEQ ID NO: 4132 - protein, 21 aa, Homo sapiens
MLQCFYVSFMPNITKQLYRLL

SEQ ID NO: 4133 - protein, 56 aa, Homo sapiens [sequence omitted]

SEQ ID NO: 4134 - protein, 169 aa, Homo sapiens; identical to SEQ ID NO: 2949

SEQ ID NO: 4135 - protein, 71 aa, Homo sapiens; identical to SEQ ID NO: 2950

SEQ ID NO: 4136 - protein, 10 aa, Homo sapiens
  SITE (3): Xaa equals any amino acid
GVXCDAWICV

SEQ ID NO: 4137 - protein, 24 aa, Homo sapiens
YLKFTFCYLNIQYIIIDYSHPAVQ

SEQ ID NO: 4138 - protein, 39 aa, Homo sapiens
  SITE (7): Xaa equals any amino acid
  SITE (13): Xaa equals any amino acid
  SITE (29): Xaa equals any amino acid
CIYVYIXTRNVFXTVFEKATLSPLNWLYXFVKDQLTVFV

SEQ ID NO: 4139 - protein, 14 aa, Homo sapiens
MYSSLFLKKLPFLP

SEQ ID NO: 4140 - protein, 30 aa, Homo sapiens
  SITE (7): Xaa equals any amino acid
MPCRFMXLLFLFSVHYFNTLKGEANISFFS

SEQ ID NO: 4141 - protein, 519 aa, Homo sapiens
RCLASSLPNSPSSKPGLLDWHLATFPSTKTPLPSYPLLPQILGTPWVGDCSFSSQINPRPPKILTTLTTPQPRSQTLFWTNFHSPVMEAVYLVVNGLGLVLDVLTLVLDLNFLLVSSLLASLAWLLAFVYNLPHTVLTSLLHLGRGVLLSLLALIEAVVRFTCGGLQALCTLLYSCCSGLESLKLLGHLASHGALRSREILHRGVLNVVSSGHALLRQACDICAIAMSLVAYVINSLVNICLIGTQNLFSLVLALWDAVTGPLWRMTDVVAAFLAHISSSAVAMAILLWTPCQLALELLASAARLLASFVLVNLTGLVLLACVLAVTVTVLHPDFTLRLATQALSQLHARPSYHRLREDVMRLSRLALGSEAWRRVWSRSLQLASWPNRGGAPGAPQGDPMRVFSVRTRRQDTLPEAGRRSEAEEEEARTIRVTPVRGRERLNEEEPPGGQDPWKLLKEQEERKKCVICQDQSKTVLLLPCRHLCLCQACTEILMRHPVYHRNCPLCRRGILQTLNVYL

SEQ ID NO: 4142 - protein, 42 aa, Homo sapiens; identical to SEQ ID NO: 2954

SEQ ID NO: 4143 - protein, 61 aa, Homo sapiens
MTLIEGVGDEVTVLFSVLACLLVLALAWVSTHTAEGGDPLPQPSGTPTPSQPSAAWQLPTA

SEQ ID NO: 4144 - protein, 61 aa, Homo sapiens; identical to SEQ ID NO: 4143

SEQ ID NO: 4145 - protein, 43 aa, Homo sapiens; identical to SEQ ID NO: 2960

SEQ ID NO: 4146 - protein, 32 aa, Homo sapiens
  SITE (20): Xaa equals any amino acid
  SITE (25): Xaa equals any amino acid
PRSLQSTLEELLLWTITLTXLYDSXLLIFFLL

SEQ ID NO: 4147 - protein, 150 aa, Homo sapiens [sequence omitted]

SEQ ID NO: 4148 - protein, 150 aa, Homo sapiens [sequence omitted]

SEQ ID NO: 4149 - protein, 150 aa, Homo sapiens [sequence omitted]

SEQ ID NO: 4150 - protein, 19 aa, Homo sapiens
IIMAIVLFFLLSWLPYYMK

SEQ ID NO: 4151 - protein, 148 aa, Homo sapiens
  SITE (25): Xaa equals any amino acid
MILFVAFITCWEEVTTLVQAIRITXYMNETILYFPFSFHSSYTVRSKKIFLSKLIVCFLSTWLPFVLLQVIIVLLKVQIPAYIEMNIPWLYFVNSFLIATVYWFNCHKLNLKDIGLPLDPFVNWKCCFIPLTIPNLEQIEKPISIMIC

SEQ ID NO: 4152 - protein, 28 aa, Homo sapiens
MNISTLQALLFIFALNTSAATKGILMRA

SEQ ID NO: 4153 - protein, 93 aa, Homo sapiens; identical to SEQ ID NO: 2966

SEQ ID NO: 4154 - protein, 10 aa, Homo sapiens
LFTFIIMTTL

SEQ ID NO: 4155 - protein, 131 aa, Homo sapiens
LAAKECLWIYFLWLIFLFCALTKLSSCLILEFYESIFLAEFRILKSSYICGPLYLFFFFFFFDGVSLLLPRLECNGAISAHCNLRLPVQVILLPQPPSSWDYKCAPPHPANFLFLVEMRFHHVLVRLVLNS

SEQ ID NO: 4156 - protein, 41 aa, Homo sapiens; identical to SEQ ID NO: 2968

SEQ ID NO: 4157 - protein, 72 aa, Homo sapiens
  SITE (36): Xaa equals any amino acid
  SITE (69): Xaa equals any amino acid
  SITE (70): Xaa equals any amino acid
KYKLVLCLSSFKKLKQTNLSFLVLKITYDCMFCIPXSRLTVFLNCYNFTPFEICPTKLFGLNVKTVTIXXLM

SEQ ID NO: 4158 - protein, 331 aa, Homo sapiens
  SITE (46): Xaa equals any amino acid
  SITE (47): Xaa equals any amino acid
  SITE (137): Xaa equals any amino acid
  SITE (141): Xaa equals any amino acid
  SITE (213): Xaa equals any amino acid
RVQSLGSDPGSLGHVGLGSLVLTLGLCYRCVTKGKMCMTTLEVWAXXERREVLAEVGVLVRFCSDAWCELSEPLVFPQLTPYFPTCGSDCIRHKGTVVLCPQTGVPFPLDNNKSKPGGWLPLLLLSLLVATWVLVAXIYLXWRHERIKKTSFSTTTLLPPIKVLVVYPSEICFHHTICYFTEFLQNHCRSEVILEKWQKKKIAEMGPVQWLAXQKKAADKVVFLLSNDVNSVCDGTCGKSEGSPSENSQDLFPLAFNLFCSDLRSQIHLHKYVVVYFREIDTKDDYNALSVCPKYHLMKDATAFCAELLHVKQQVSAGKRSQACHDGCCSL

SEQ ID NO: 4159 - protein, 4 aa, Homo sapiens
LSVL

SEQ ID NO: 4160 - protein, 88 aa, Homo sapiens
  SITE (87): Xaa equals any amino acid
KYYLSMNLTVCFCCHFYHYLIKVSRQIDNTFILDYSLRGLRRKVLLNSQVGTTKQYENDQDFRFNEIMESHLKHYFIFFQLKKKKKXS

SEQ ID NO: 4161 - protein, 94 aa, Homo sapiens
MIFFLYMYVCFASAVYIPELWPTHLRLRGSGFVNAVGRIVAVFTPYGVAALLTHYGSITVFMVLGVMLLLCALVLSIFGIETRKVSLEEISEVN

SEQ ID NO: 4162 - protein, 133 aa, Homo sapiens
MVKSGISGRWNSGFTAEADQLELLSRSKTVTVPKVWAVGADRDYSFLVMDYLPPRPLDAHSAFILGQQIARLHQWSDQPQFGLDFDNALSTTPQPNTWQRRWSTFFAEQRIGWQLELAAEKGIAFGNIDAIVE

SEQ ID NO: 4163 - protein, 50 aa, Homo sapiens
MKTGINVLCIEMFSFIIWCLYLRVYIISPPVSCCQKKNFEFRKRIGVKPG

SEQ ID NO: 4164 - protein, 4 aa, Homo sapiens
IYLH

SEQ ID NO: 4165 - protein, 12 aa, Homo sapiens
  SITE (12): Xaa equals any amino acid
LWRALAWVLPQX

SEQ ID NO: 4166 - protein, 4 aa, Homo sapiens
WPPA

SEQ ID NO: 4167 - protein, 30 aa, Homo sapiens; identical to SEQ ID NO: 2974

SEQ ID NO: 4168 - protein, 165 aa, Homo sapiens
MDRAGRRLLLVLSGVVMVFSTSAFGAYFKLTQGGPGNSSHVAISAPVSAQPVDASVGLAWLAVGSMCLFIAGFAVGWGPIPWLLMSEIFPLHVKGVATGICVLTNWLMAFLVTKEFSSLMEVLRPYGAFWLASAFCIFSVLFTLFCVPETKGKTLEQITAHFEGR

SEQ ID NO: 4169 - protein, 302 aa, Homo sapiens
MKAPGRLVLIILCSVVFSAVYILLCCWAGLPLCLATCLDHHFPTGSRPTVPGPLHFSGYSSVPDGKPLVREPCRSCAVVSSSGQMLGSGLGAEIDSAECVFRMNQAPTVGFEADVGQRSTLRVVSHTSVPLLLRNYSHYFQKARDTLYMVWGQGRHMDRVLGGRTYRTLLQLTRMYPGLQVYTFTERMMAYCDQIFQDETGKNRRQSGSFLSTGWFTMILALELCEEIVVYGMVSDSYCREKSHPSVPYHYFEKGRLDECQMYLAHEQAPRSAHRFITEKAVFSRWAKKRPIVFAHPSWRTE

SEQ ID NO: 4170 - protein, 184 aa, Homo sapiens
  SITE (15): Xaa equals any amino acid
  SITE (104): Xaa equals any amino acid
  SITE (157): Xaa equals any amino acid
  SITE (172): Xaa equals any amino acid
  SITE (176): Xaa equals any amino acid
NCATVNADPAYGSPXSVTFPGHSCFHCVDGGLCPLPGVRQLLVCRIPGASVVQSKLEADLCMLFLCNNWLVSLFCSLLIGSCFLCVQNKNKFGQKKKKKKGGRXRGSKLTYACMRRHSSSIVSPKFNSLAVVLQRRDWENPGVTQLNRLAAHPPFAXWRNSEEARTDRPSQXLRTXNGEWGRAL

SEQ ID NO: 4171 - protein, 64 aa, Homo sapiens
MVPVKCWQYMCEPPYLVCLFLSTATLGPCCPTSLPSSFHLTLSPHEGSDAGSSVRCAFLCLHVN

SEQ ID NO: 4172 - protein, 31 aa, Homo sapiens; identical to SEQ ID NO: 2978

SEQ ID NO: 4173 - protein, 64 aa, Homo sapiens; identical to SEQ ID NO: 4171

SEQ ID NO: 4174 - protein, 50 aa, Homo sapiens [sequence omitted]

SEQ ID NO: 4175 - protein, 62 aa, Homo sapiens; identical to SEQ ID NO: 2980

SEQ ID NO: 4176 - protein, 28 aa, Homo sapiens
SFKISLFCTLSLYLSNWPTLRENRKEPT

SEQ ID NO: 4177 - protein, 87 aa, Homo sapiens [sequence omitted]

SEQ ID NO: 4178 - protein, 195 aa, Homo sapiens; identical to SEQ ID NO: 2982

SEQ ID NO: 4179 - protein, 168 aa, Homo sapiens
GTRLSHIVTANRHLLMGLTSQLLPPLFFLLACAGNFVHGHKCDITLQEIIKTLNSLTEQKTLCTELTVTDIFAASKNTTEKETFCRAATVLRQFYSHHEKDTRCLGATAQQFHRHKQLIRFLKRLDRNLWGLAGLNSCPVKEANQSTLENFLERLKTIMREKYSKCSS

SEQ ID NO: 4180 - protein, 195 aa, Homo sapiens; identical to SEQ ID NO: 2982

SEQ ID NO: 4181 - protein, 48 aa, Homo sapiens [sequence omitted]

SEQ ID NO: 4182 - protein, 161 aa, Homo sapiens
EFGTSAAMALLLSVLRVLLGGFFALVGLAKLSEEISAPVSERMNALFVQFAEVFPLKVFGYQPDPLNYQIAVGFLELLAGLLLVMGPPMLQEISNLFLILLMMGAIFTLAALKESLSTCIPAIVCLGFLLLLNVGQLLAQTKKVVRPTRKKTLSTFKESWK

SEQ ID NO: 4183 - protein, 120 aa, Homo sapiens
  SITE (9): Xaa equals any amino acid
  SITE (11): Xaa equals any amino acid
  SITE (14): Xaa equals any amino acid
  SITE (16): Xaa equals any amino acid
  SITE (17): Xaa equals any amino acid
  SITE (20): Xaa equals any amino acid
  SITE (23): Xaa equals any amino acid
  SITE (25): Xaa equals any amino acid
RAPSFKKLXGXPPXGXXREXSGXRXRPQSARAAMALLLSVLRVLLGGFFALVGLAKLSEEISAPVSERMNALFVQFAEVFPLKVFGYQPDPLKLPNSCGLSGTAGWVAAGHGPTDAARDQ

SEQ ID NO: 4184 - protein, 120 aa, Homo sapiens; identical to SEQ ID NO: 4183
  SITE (9): Xaa equals any amino acid
  SITE (11): Xaa equals any amino acid
  SITE (14): Xaa equals any amino acid
  SITE (16): Xaa equals any amino acid
  SITE (17): Xaa equals any amino acid
  SITE (20): Xaa equals any amino acid
  SITE (23): Xaa equals any amino acid
  SITE (25): Xaa equals any amino acid

SEQ ID NO: 4185 - protein, 94 aa, Homo sapiens
MVQYKSSFLPLLANLAFVYFGASVFCLIICFVGICVYFLVHHMQFTSVLTTPSQVNSNYICIQLRGPISSHLFPSQYIQQIFIEPLLWANHCTG

SEQ ID NO: 4186 - protein, 21 aa, Homo sapiens
MAFRLFVSSFFSPPLSLQMCN

SEQ ID NO: 4187 - protein, 173 aa, Homo sapiens
  SITE (86): Xaa equals any amino acid
  SITE (167): Xaa equals any amino acid
GSFPHTCLFLKRLLSYLKASPHPATLTPGLWKMSGLPHNSRLTAVAPLLAGSQKPRGVPVVLEFFPQRRPAFNQPKGPKALDNCCXKASLGLAPTLCHPVLPAAMFQRRPLPPAFGLTLHLTTDSSLCVGRELSRRPPLRIEACIGLVSPHMPISEEASVLFEGQPXPSYFNT

SEQ ID NO: 4188 - protein, 27 aa, Homo sapiens
MNCMSWWWMPSLASASRAMFGNRSTAS

SEQ ID NO: 4189 - protein, 27 aa, Homo sapiens
MNCMSWWWMPSLASASRAMFGNRSTAS

SEQ ID NO: 4190 - protein, 38 aa, Homo sapiens; identical to SEQ ID NO: 2989

SEQ ID NO: 4191 - protein, 149 aa, Homo sapiens
  SITE (71): Xaa equals any amino acid
  SITE (73): Xaa equals any amino acid
  SITE (78): Xaa equals any amino acid
  SITE (79): Xaa equals any amino acid
PPSPGAQPLPTATMAEDADMRNELEEMQRRADQLADESLESTRRMLQLVEESKDAGIRTLVMLDEQGEQLXRXEEGMXXINQDMKEAEKNLKDLGKCCGLFICPCNKLKSSDAYKKAWGNNQDGVVASQPARVVDEREQMAISGGFIRR

SEQ ID NO: 4192 - protein, 285 aa, Homo sapiens
  SITE (99): Xaa equals any amino acid
  SITE (248): Xaa equals any amino acid
MTDYWVLIFFNLLFTSAPPVIYGVLEKDVSAETLMQLPELYRSGQKSEAYLPHTFWITLLDAFYQSLVCFFVPYFTYQGSDTDIFAFGNPLNTAALFIXLLHLVIESKSLTWIHLLVIIGSILSYFLFAIVFGAMCVTCNPPSNPYWIMQEHMLDPVFYLVCILTTSIALLPRFVYRVLQGSLFPSPILRAKHFDRLTPEERTKALKKWRGAGKMNQVTSKYANQSAGKSGRRPMPGPSAVFAMKSAXSCAIEQGNLSLCETALDQGYSETKAFEMAGPSKGKES

SEQ ID NO: 4193 - protein, 86 aa, Homo sapiens; identical to SEQ ID NO: 2992

SEQ ID NO: 4194 - protein, 260 aa, Homo sapiens
  SITE (199): Xaa equals any amino acid
GSATEVDNNFSKPPPFFPPGAPPTHLPPPPFLPPPPTVSTAPPLIPPPGIPITVPPPGFPPPPGAPPPSLIPTIESGHSSGYDSRSARAFPYGNVAFPHLPGSAPSWPSLVDTSKQWDYYARREKDRDRERDRDRERDRDRDRERERTRERERERDHSPTPSVFNSDEERYRYREYAERGYERHRASREKEERHRERRXREKEETRHKSSRSNSRRRHESEEGDSHRRHKHKKSKRSKEGKEAGSEPAPEQESTEATPAE

SEQ ID NO: 4195 - protein, 52 aa, Homo sapiens; identical to SEQ ID NO: 2994

SEQ ID NO: 4196 - protein, 52 aa, Homo sapiens; identical to SEQ ID NO: 2994

SEQ ID NO: 4197 - protein, 227 aa, Homo sapiens
PPPTVSTAPPLIPPPGIPITVPPPGFPPPPGAPPPSLIPTIESGHSSGYDSRSARAFPYGNVAFPHLPGSAPSWPSLVDTSKQWDYYARREKDRDRERDRDRERDRDRDRERERTRERERERDHSPTPSVFNSDEERYRYREYAERGYERHRASREKEERHRERRHREKEETRHKSSRSNSRRRHESEEGDSHRRHKHKKSKRSKEGKEAGSEPAPEQESTEATPAE

SEQ ID NO: 4198 - protein, 43 aa, Homo sapiens
MGLLGSTHQMLWFSTTVAMCRGCSERGMRARRPWLLFEMDGEN

SEQ ID NO: 4199 - protein, 184 aa, Homo sapiens
  SITE (165): Xaa equals any amino acid
  SITE (176): Xaa equals any amino acid
MLANQGIDVVIRHSFFDHGYNHLVDQNFNPLPDYWLSLLYKRLIGPKVLAVHVAGLQRKPRPGRVIRDKLRIYAHCTNHHNHNYVRGSITLFIINLHRSRKKIKLAGTLRDKLVHQYLLQPYGQEGLKSKSVQLNGQPLVMVDDGTLPELKPRPLRAGRTLVIPXVTMGFFVVKNXNALACRYR

SEQ ID NO: 4200 - protein, 480 aa, Homo sapiens [sequence omitted]

SEQ ID NO: 4201 - protein, 60 aa, Homo sapiens
MMDGSSCRERKFSLTVLTGFLVLTSSRIRVFSFKPAALSTGKGLLSPAWEERERWSNRAK

SEQ ID NO: 4202 - protein, 69 aa, Homo sapiens
MSMLWPAATDKLSSHSWLPVGLLGCFHSSTPVVSSVFRHPSNQPLLPHPAGINTDLLSKETKCHSVILA

SEQ ID NO: 4203 - protein, 214 aa, Homo sapiens
PRVRVTTSAGGTNNLSDSYAAGFLWLNTLGMLANQGIDVVIRHSFFDHGYNHLVDQNFNPLPDYWLSLLYKRLIGPKVLAVHVAGLQRKPRPGRVIRDKLRIYAHCTNHHNHNYVRGSITLFIINLHRSRKKIKLAGTLRDKLVHQYLLQPYGQEGLKSKSVQLNGQPLVMVDDGTLPELKPRPLRAGRTLVIPPVTMGFFVVKNVNALACRYR

SEQ ID NO: 4204 - protein, 49 aa, Homo sapiens
  SITE (46): Xaa equals any amino acid
  SITE (49): Xaa equals any amino acid
LPPWSSFYLYTITGFQILKINSCSPSSFCLLTCFIPHGLNTPVPWXFLX

SEQ ID NO: 4205 - protein, 60 aa, Homo sapiens
  SITE (17): Xaa equals any amino acid
  SITE (18): Xaa equals any amino acid
ILIPFKHVTLRLKDKVXXKCIFFNDKVYISYEEMEKNFFNGSWGKGGISVLIFLPLLARS

SEQ ID NO: 4206 - protein, 74 aa, Homo sapiens
CHMSLMGLQVLPRACTLLLWGSAPAGEELQMPRSQQTQGPLEKNSFFISISREDPKVKVSLFTVISGRSSLRPS

SEQ ID NO: 4207 - protein, 587 aa, Homo sapiens
MRPRGLPPLLVVLLGCWASVSAQTDATPAVTTEGLNSTEAALATFGTFPSTRPPGTPRAPGPSSGPRPTPVTDVAVLCVCDLSPAQCDINCCCDPDCSSVDFSVFSACSVPVVTGDSQFCSQKAVIYSLNFTANPPQRVFELVDQINPSIFCIHITNYKPALSFINPEVPDENNFDTLMKTSDGFTLNAESYVSFTTKLDIPTAAKYEYGVPLQTSDSFLRFPSSLTSSLCTDNNPAAFLVNQAVKCTRKINLEQCEEIEALSMAFYSSPEILRVPDSRKKVPITVQSIVIQSLNKTLTRREDTDVLQPTLVNAGHFSLCVNVVLEVKYSLTYTDAGEVTKADLSFVLGTVSSVVVPLQQKFEIHFLQENTQPVPLSGNPGYVVGLPLAAGFQPHKGSGIIQTTNRYGQLTILHSTTEQDCLALEGVRTPVLFGYTMQSGCKLRLTGALPCQLVAQKVKSLLWGQGFPDYVAPFGNSQAQDMLDWVPIHFITQSFNRKDSCQLPGALVIEVKWTKYGSLLNPQAKIVNVTANLISSSFPEANSGNERTILISTAVTFVDVSAPAEAGFRAPPAINARLPFNFFFPFV

SEQ ID NO: 4208 - protein, 18 aa, Homo sapiens
VGCSTSVSSRRVSVLFRD

SEQ ID NO: 4209 - protein, 61 aa, Homo sapiens
  SITE (58): Xaa equals any amino acid
VIWCEIWIQVLLCFCFVLFCFCLWIFKCFHTICLKILPFLNKKKKKRAAALEDPSLRXRAC

SEQ ID NO: 4210 - protein, 21 aa, Homo sapiens
MWVFLVVFFCFFFLFPFWVQL

SEQ ID NO: 4211 - protein, 331 aa, Homo sapiens
AFAKSYLGDTIEGTPAGTGPEFPGRPTRPEQPARAEVGAATALPVRWASGEMAPSGSLAVPLAVLVLLLWGAPWTHGRRSNVRVITDENWRELLEGDWMIEFYAPWCPACQNLQPEWESFAEWGEDLEVNIAKVDVTEQPGLSGRFIITALPTIYHCKDGEFRRYQGPRTKKDFINFISDKEWKSIEPVSSWFGPGSVLMSSMSALFQLSMWIRTCHNYFIEDLGLPVWGSYTVFALATLFSGLLLGLCMIFVADCLCPSKRRRPQPYPYPSKKLLSESAQPLKKVEEEQEADEEDVSEEEAESKEGTNKDFPQNAIRQRSLGPSLATDKS

SEQ ID NO: 4212 - protein, 46 aa, Homo sapiens
EQIFYMYYCFLFFVFCFFETGSHSVTQAGVQWCDLGSLQPPPSEFK

SEQ ID NO: 4213 - protein, 46 aa, Homo sapiens; identical to SEQ ID NO: 4212

SEQ ID NO: 4214 - protein, 189 aa, Homo sapiens
TRPSTRSVSWATTMAMSFEWPWQYRFPPFFTLQPNVDTRQKQLAAWCSLVLSFCRLHKQSSMTVMEAQESPLFNNVKLQRKLPVESIQIVLEELRKKGNLEWLDKSKSSFLIMWRRPEEWGKLIYQWVSRSGQNNSVFTLYELTNGEDTEDEEFHGLDEATLLRALQALQQEHKAEIITVSDGRGVKFF

SEQ ID NO: 4215 - protein, 29 aa, Homo sapiens
FVVVLLLLLLFCVCVCCLISMLLSWKVFV

SEQ ID NO: 4216 - protein, 29 aa, Homo sapiens
FVVVLLLLLLFCVCVCCLISMLLSWKVFV

SEQ ID NO: 4217 - protein, 9 aa, Homo sapiens
ASPRRMCLA

SEQ ID NO: 4218 - protein, 7 aa, Homo sapiens
LLPKQPP

SEQ ID NO: 4219 - protein, 244 aa, Homo sapiens
  SITE (103): Xaa equals any amino acid
  SITE (127): Xaa equals any amino acid
  SITE (241): Xaa equals any amino acid
  SITE (244): Xaa equals any amino acid
MQLRLFRRLLLAALLLVIVWTLFGPSGLGEELLSLSLASLLPAPASPGPPLALPRLLIPNQEACSGPGAPPFLLILVCTAPENLNQRNAIRASWGGLREARGXRVQTLFLLGEPNAQHPVWGSQGSXLASESAAQGDILQAAFQDSYRNLTLKTLSGLNWAEKHCPMARYVLKTDDDVYVNVPELVSELVLRGGRWGQWERSTEPQREAEQEGGQVLHSEEVPLLYWGRVQKRVGKLFPVXSPX

SEQ ID NO: 4220 - protein, 74 aa, Homo sapiens
REQLQHFFLFLFPMTIFWAGGPGPWVSPISLSLVRLRIWYKETDQLQPVRAPALGLGERRSCSCLSCGPRHSQL

SEQ ID NO: 4221 - protein, 55 aa, Homo sapiens; identical to SEQ ID NO: 3012

SEQ ID NO: 4222 - protein, 109 aa, Homo sapiens
  SITE (85): Xaa equals any amino acid
  SITE (95): Xaa equals any amino acid
  SITE (99): Xaa equals any amino acid
  SITE (101): Xaa equals any amino acid
  SITE (102): Xaa equals any amino acid
  SITE (103): Xaa equals any amino acid
  SITE (107): Xaa equals any amino acid
MRLSLPLLLLLLGAWAIPGGLGDRAPLTATAPQLDDEEMYSAHMPAHLRCDACRAVAYQMWQNLAKAETKLHTSNSGGRRELSEXVYKDVLDRSXSGTXRXXXFEKXTK

SEQ ID NO: 4223 - protein, 111 aa, Homo sapiens
MRLSLPLLLLLLGAWAIPGGLGDRAPLTATAPQLDDEEMYSAHMPAHLRCDACRAVAYQMWQNLAKAETKLHTSNSGGRRELSELVYTDVLDRSCSRNWQDLARGQSQASA

SEQ ID NO: 4224 - protein, 189 aa, Homo sapiens; identical to SEQ ID NO: 3014

SEQ ID NO: 4225 - protein, 76 aa, Homo sapiens
RTTKDFLFRSITNYISFFFFFFFPRLRLKKKKSKIYFLYSLINAVVLGDDHSYNMSFFWFCFGLVFANYFVIFPKN

SEQ ID NO: 4226 - protein, 112 aa, Homo sapiens
SVHTPESPAFSNSSIVNVPGESTLRRDFLRLQQENKERSEALRRQQLLQEQQLREQEEYKRQLLAERQKRIEQQKEQRRRLEEVAKGKCPSWLVFSLSAFTLVVSHSEEYPL

SEQ ID NO: 4227 - protein, 189 aa, Homo sapiens; identical to SEQ ID NO: 3014

SEQ ID NO: 4228 - protein, 111 aa, Homo sapiens; identical to SEQ ID NO: 4223

SEQ ID NO: 4229 - protein, 245 aa, Homo sapiens
  SITE (113): Xaa equals any amino acid
PMASPIASISPVFTGTSSSRWTTSTDRAEVLAVGGQPVGLTQGLVFRACDGDRSIDPEIQRYNTPGFSGCLSGVRFNNVAPLKTHFRTPRPMTAELAEALRVQGELSESNCGXMPRLVSEVPPELDPWYLPPDFPYYHDEGWVAILLGFLVAFLLLGLVGMLVLFYLQNHRYKGSYHTNEPKAAHEYHPGSKPPLPTSGPAQVPTPTAAPNQAPASAPAPAPTPAPAPGPRDQNLPQILEESRSE

SEQ ID NO: 4230 - protein, 189 aa, Homo sapiens; identical to SEQ ID NO: 3014

SEQ ID NO: 4231 - protein, 189 aa, Homo sapiens; identical to SEQ ID NO: 3014

SEQ ID NO: 4232 - protein, 228 aa, Homo sapiens [sequence omitted]

SEQ ID NO: 4233 - protein, 51 aa, Homo sapiens
TGVCGRSSTFCTVWGGVPRLPSRCFVKARGPPVALIPNGGPGSPFSAINQA

SEQ ID NO: 4234 - protein, 92 aa, Homo sapiens
GQTPMPEQRLGARPALRLQSPQSLRCRRAAGMGSGVPICGSPAAPAAAALSRPQERGRPAEVCSSRDVTLQGLGRFAFVEASSEWLCEIKMF

SEQ ID NO: 4235 - protein, 179 aa, Homo sapiens
  SITE (33): Xaa equals any amino acid
  SITE (51): Xaa equals any amino acid
  SITE (52): Xaa equals any amino acid
  SITE (88): Xaa equals any amino acid
  SITE (127): Xaa equals any amino acid
  SITE (129): Xaa equals any amino acid
NIPFSGHSLDANVQRSMLWSVVNFAQLAWQWGXGAGLPGPVLVPSGRRHHXXRFRPQHDSPTPVPTQSSACEDELLHQGHPQAVWQPXSTSCPWEEPSSGLSISSMTFEEAATWRSQARASSRPPPXAXPSIATMAMDANYICMVTFSSQPFIYLNLLLYLLYPLLSSASFQEIIKTFL

SEQ ID NO: 4236 - protein, 9 aa, Homo sapiens
MALCGFLCY

SEQ ID NO: 4237 - protein, 162 aa, Homo sapiens
  SITE (103): Xaa equals any amino acid
VAATSWPQPSDSDVVGLGVASSQGIGTFRSSQVTHRQLGMRTVRREGQKSQDALEKPLAPPVTSSWLDSWSGLSIREALASRPQGWGLLHMVIKDLASSASPXAVLVSPSITTHQFTNKHDSVLLVLGPVLGAGDEAKRERGSSVFHRGGDKPGPDESDSCC

SEQ ID NO: 4238 - protein, 311 aa, Homo sapiens
ALPGAPGAKAGAAAMGLGQPQAWLLGLPTAVVYGSLALFTTILHNVFLLYYVDTFVSVYKINKMAFWVGETVFLLWNSLNDPLFGWLSDRQFLSSQPRLCGEELLVGSEEADSITLGRYLRQLARHRNFLWFVSMDLVQVFHCHFNSNFFPLFLEHLLSDHISLSTGSILLGLSYVAPHLNNLYFLSLCRRWGVYAVVRGLFLLKLGLSLLMLLAGPDHLSLLCLFIASNRVFTEGTCKLLTLVVTDLVDEDLVLNHRKQAASALLFGMVALVTKPGQTFAPLLGTWLLCFYTGWDLGYALDKAGWCNDAL

SEQ ID NO: 4239 - protein, 77 aa, Homo sapiens
MGLGQPQAWLLGLPTAVVYGSLALFTTILHNVFLLYYVDTFVSVYKINKMAFWVGETVFLLWNSLNDPLFGWLSDRQ

SEQ ID NO: 4240 - protein, 162 aa, Homo sapiens
VAATSWPQPSDSDVVGLGVASSQGIGTFRSSQVTHRQLGMRTVRREGQKSQDALEKPLAPPVTSSWLDSWSGLSIREALASRPQGWGLLHMVIKDLASSASPTAVLVSPSITTHQFTNKHDSVLLVLGPVLGAGDEAKRERGSSVFHRGGDKPGPDESDSCC

SEQ ID NO: 4241 - protein, 225 aa, Homo sapiens; identical to SEQ ID NO: 3020

SEQ ID NO: 4242 - protein, 225 aa, Homo sapiens; identical to SEQ ID NO: 3021

SEQ ID NO: 4243 - protein, 47 aa, Homo sapiens
  SITE (34): Xaa equals any amino acid
  SITE (45): Xaa equals any amino acid
MAGLVLVFLGILLFEAQHSQRNPQDAAGRLNSGXDNAPFTWWTSXTI

SEQ ID NO: 4244 - protein, 8 aa, Homo sapiens
FQATHCGR

SEQ ID NO: 4245 - protein, 235 aa, Homo sapiens; identical to SEQ ID NO: 3026

SEQ ID NO: 4246 - protein, 235 aa, Homo sapiens
MPWVLLLLTLLTHSAVSVVQAGLTQPPSVSKDLRQTATLTCTGNNNNVGDQGAAWLQQHQGHPPKLLSYRNNNRPSGISERLSASRSGATSSLTITGLQPEDEADYYCAAYDSSLAVWMFGGGTKLTVLGQPKAAPSVTLFPPSSEELQANKATLVCLISDFYPGAVTVAWKADGSPVKAGVETTTPSKQSNNKYAASSYLSLTPEQWKSHRSYSCQVTHEGSTVEKTVAPTECS

SEQ ID NO: 4247 - protein, 235 aa, Homo sapiens
  SITE (110): Xaa equals any amino acid
  SITE (212): Xaa equals any amino acid
MPWVLLLLTLLTHSAVSVVQAGLTQPPSVSKDLRQTATLTCTGNNNNVGDQGAAWLQQHQGHPPKLLSYRNNNRPSGISERLSASRSGATSSLTITGLQPEDEADYYCAXYDSSLAVWMFGGGTKLTVLGQPKAAPSVTLFPPSSEELQANKATLVCLISDFYPGAVTVAWKADSSPVKAGVETTTPSKQSNNKYAASSYLSLTPEQWKSHXSYSCQVTHEGSTVEKTVAPTECS

SEQ ID NO: 4248 - protein, 235 aa, Homo sapiens
MPWVLLLLTLLTHSAVSVVQAGLTQPPSVSKDLRQTATLTCTGNNNNVGDQGAAWLQQHQGHPPKLLSYRNNNRPSGISERLSASRSGATSSLTITGLQPEDEADYYCAAYDSSLAVWMFGGGTKLTVLGQPKAAPSVTLFPPSSEELQANKATLVCLISDFYPGAVTVAWKADSSPVKAGVETTTPSKQSNNKYAASSYLSLTPEQWKSHRSYSCQVTHEGSTVEKTVAPTECS

SEQ ID NO: 4249 - protein, 189 aa, Homo sapiens; identical to SEQ ID NO: 3014

SEQ ID NO: 4250 - protein, 189 aa, Homo sapiens; identical to SEQ ID NO: 3014

SEQ ID NO: 4251 - protein, 189 aa, Homo sapiens; identical to SEQ ID NO: 3014

SEQ ID NO: 4252 - protein, 58 aa, Homo sapiens
EYIHSLWRWLCSLVLAPSYMVAEVLLQSYDCSLLCDLRRMCGGPIFLRCVGVFCRKFC

SEQ ID NO: 4253 - protein, 15 aa, Homo sapiens
AVWPWFCSHQVGAWD

SEQ ID NO: 4254 - protein, 78 aa, Homo sapiens [sequence omitted]

SEQ ID NO: 4255 - protein, 7 aa, Homo sapiens
ILFLLLL

SEQ ID NO: 4256 - protein, 44 aa, Homo sapiens [sequence omitted]

SEQ ID NO: 4257 - protein, 82 aa, Homo sapiens
HFDEGKAVYLKLDLLVDGVLALRCLEEFSATAASSLGPQLRLCQVSGLLALRPGSSLRIRTLPWAHLKAAPFLTYFGLFQVH

SEQ ID NO: 4258 - protein, 45 aa, Homo sapiens; identical to SEQ ID NO: 3037

SEQ ID NO: 4259 - protein, 132 aa, Homo sapiens
VNSLIDDGNMCIDLLDKSKRIEFSSRHLLSSLITSALLDFFLVPGAGFGRLIVLSTENATPGWAALESFFPSLASFPLVLGSFSLLSFPKPPEAFASFSLSLADGTLGSFSLESFSFPKLLLMVTQAWTKTT

SEQ ID NO: 4260 - protein, 107 aa, Homo sapiens; identical to SEQ ID NO: 3039

SEQ ID NO: 4261 - protein, 278 aa, Homo sapiens
GKCNLHSQPTSLTPSQGESTMDGIIEQKSMLVHSKISDAGKRNGLINTRNLMAESRDGLVSVYPAPQYQSHRVGASTVPASLDSSRSEPMQQLLDPNTLQQSVESRYRPNIILYSEGVLRSWGDGVAADCCETTFIEDRSPTKDSLEYPDGKFIDLSADDIKIHTLSYDVEEEEEFQELESDYSSDTESEDNFLMMPPRDHLGLSVFSMLCCFWPLGIAAFYLSHETNKAVAKGDLHQASTSSRRALFLAVLSITIGTGVYVGVAVALIAYLSKNNHL

SEQ ID NO: 4262 - protein, 216 aa, Homo sapiens
GGGIHRLHNGALQLRVLQRVEHLHLLHHAVKHICTASLPVLHGFIAAQCRPGRMGGLLLAAFLALVSVPRAQAVWLGRLDPEQLLGPWYVLAVASREKGFAMEKDMKNVVGVVVTLTPENNLRTLSSQHGLGGCDQSVMDLIKRNSGWVFENPSIGVLELWVLATNFRDYAIIFTQLEFGDEPFNTVELYSLTETASQEAMGLFTKWSRSLGFLSQ

SEQ ID NO: 4263 - protein, 220 aa, Homo sapiens
GTLNGGGIHRLHNGALQLRVLQRVEHLHLLHHAVKHICTASLPVLHGFIAAQCRPGRMGGLLLAAFLALVSVPRAQAVWLGRLDPEQLLGPWYVLAVASREKGFAMEKDMKNVVGVVVTLTPENNLRTLSSQHGLGGCDQSVMDLIKRNSGWVFENPSIGVLELWVLATNFRDYAIIFTQLEFGDEPFNTVELYSLTETASQEAMGLFTKWSRSLGFLSQ

SEQ ID NO: 4264 - protein, 89 aa, Homo sapiens; identical to SEQ ID NO: 3042

SEQ ID NO: 4265 - protein, 151 aa, Homo sapiens; identical to SEQ ID NO: 3043

SEQ ID NO: 4266 - protein, 39 aa, Homo sapiens
MSTFKSLTPNPHAVCISFAYLFLCFSLSSALCLNGKIDL

SEQ ID NO: 4267 - protein, 163 aa, Homo sapiens
MSLLLLVVSALHILILILLFVATLDKSWWTLPGKESLNLWYDCTWNNDTKTWACSNVSENGWLKAVQVLMVLSLILCCLSFILFMFQLYTMRRGGLFYATGLCQLCTSVAVFTGALIYAIHAEEILEKHPRGGSFGYCFALAWVAFPLALVSGIIYIHLRKRE

SEQ ID NO: 4268 - protein, 163 aa, Homo sapiens; identical to SEQ ID NO: 4267

SEQ ID NO: 4269 - protein, 123 aa, Homo sapiens
  SITE (97): Xaa equals any amino acid
  SITE (98): Xaa equals any amino acid
  SITE (99): Xaa equals any amino acid
  SITE (100): Xaa equals any amino acid
  SITE (116): Xaa equals any amino acid
  SITE (122): Xaa equals any amino acid
MSLLLLVVSALHILILILLFVATLDKSWWTLPGKESLNLWYDCTWNNDTKTWACSNVSENGWLKAVQVLMVLSLILCCLSFILFMFQLYTMRRGVSXXXXRGFQLLPVCTSVAVFXGGLTMXF

SEQ ID NO: 4270 - protein, 398 aa, Homo sapiens
MGAPAASLLLLLLLFACCWAPGGANLSQDDSQPWTSDETVVAGGTVVLKCQVKDHEDSSLQWSNPAQQTLYFGEKRALRDNRIQLVTSTPHELIISISNVALADEGEYTCSIFTMPVRTAKSLVTVLGIPQKPIITGYKSSLREKDTATLNCQSSGSKPAARLTWRKGDQELHGEPTRIQEDPNGKTFTVSSSVTFQVTREDDGASIVCSVNHESLKGADRSTSQRIEVLYTPTAMIRPDPPHPREGQKLLLHCEGRGNPVPQQYLWEKEGSVPPLKMTQESALIFPFLNKSDSGTYGCTATSNMGSYKAYYTLNVNDPSPVPSSSSTYHAIIGGIVAFIVFLLLIMLIFLGHYLIRHKGTYLTHEAKGSDDAPDADTAIINAEGGQSGGDDKKEYFI

SEQ ID NO: 4271 - protein, 58 aa, Homo sapiens
PAWCLHRGTASHARRLLQGKPWSATHHEDRAGRLSAEEKHEAGGWGGGGGTKVASRQR

SEQ ID NO: 4272 - protein, 106 aa, Homo sapiens
QCPMGPLLLPAPSLLLLMHSPLPAAPGFPAFLLTPSNSLGTPAATTLWVGHWDPLAQSWLLLTPSLDACPGTPSPLPLPCSFNRVNHVYCTGAVVIAETAGWRRSR

SEQ ID NO: 4273 - protein, 59 aa, Homo sapiens; identical to SEQ ID NO: 3048

SEQ ID NO: 4274 - protein, 19 aa, Homo sapiens
AWVVYLVCVVGGQCVFCVA

SEQ ID NO: 4275 - protein, 912 aa, Homo sapiens
  SITE (97): Xaa equals any amino acid
  SITE (151): Xaa equals any amino acid
MPGKRGLGWWWARLPLCLLLSLYGPWMPSSLGKPKGHPHMNSIRIDGDITLGGLFPVHGRGSEGKPCGELKKEKGIHRLEAMLFALDRINNDPDLLXNITLGARILDTCSRDTHALEQSLTFVQALIEKDGTEVRCGSGGPPIITKPERVXGVIGASGSSVSIMVANILRLFKIPQISYASTAPDLSDNSRYDFFSRVVPSDTYQAQAMVDIVRALKWNYVSTVASEGSYGESGVEAFIQKSREDGGVCIAQSVKIPREPKAGEFDKIIRRLLETSNARAVIIFANEDDIRRVLEAARRANQTGHFFWMGSDSWGSKIAPVLHLEEVAEGAVTILPKRMSVRGFDRYFSSRTLDNNRRNIWFAEFWEDNFHCKLSRHALKKGSHVKKCTNRERIGQDSAYEQEGKVQFVIDAVYAMGHALHAMHRDLCPGRVGLCPRMDPVDGTQLLKYIRNVNFSGIAGNPVTFNENGDAPGRYDIYQYQLRNDSAEYKVIGSWTDHLHLRIERMHWPGSGQQLPRSICSLPCQPGERKKTVKGMPCCWHCEPCTGYQYQVDRYTCKTCPYDMRPTENRTGCRPIPIIKLEWGSPWAVLPLFLAVVGIAATLFVVITFVRYNDTPIVKASGRELSYVLLAGIFLCYATTFLMIAEPDLGTCSLRRIFLGLGMSISYAALLTKTNRIYRIFEQGKRSVSAPRFISPASQLAITFSLISLQLLGICVWFVVDPSHSVVDFQDQRTLDPRFARGVLKCDISDLSLICLLGYSMLLMVTCTVYAIKTRGVPETFNEAKPIGFTMYTTCIVWLAFIPIFFGTSQSADKLYIQTTTLTVSVSLSASVSLGMLYMPKVYIILFHPEQNVPKRKRSLKAVVTAATMSNKFTQKGNFRPNGEAKSELCENLEAPALATKQTYVTYTNHAI

SEQ ID NO: 4276 - protein, 959 aa, Homo sapiens
  SITE (377): Xaa equals any amino acid
MPGKRGLGWWWARLPLCLLLSLYGPWMPSSLGKPKGHPHMNSIRIDGDITLGGLFPVHGRGSEGKPCGELKKEKGIHRLEAMLFALDRINNDPDLLPNITLGARILDTCSRDTHALEQSLTFVQALIEKDGTEVRCGSGGPPIITKPERVVGVIGASGSSVSIMVANILRLFKIPQISYASTAPDLSDNSRYDFFSRVVPSDTYQAQAMVDIVRALKWNYVSTVASEGSYGESGVEAFIQKSREDGGVCIAQSVKIPREPKAGEFDKIIRRLLETSNARAVIIFANEDDIRRVLEAARRANQTGHFFWMGSDSWGSKIAPVLHLEEVAEGAVTILPKRMSVRGFDRYFSSRTLDNNRRNIWFAEFWEDNFHCKLSRXALKKGSHVKKCTNRERIGQDSAYEQEGKVQFVIDAVYAMGHALHAMHRDLCPGRVGLCPRMDPVDGTQLLKYIRNVNFSGIAGNPVTFNENGDAPGRYDIYQYQLRNDSAEYKVIGSWTDHLHLRIERMHWPGSGQQLPRSICSLPCQPGERKKTVKGMPCCWHCEPCTGYQYQVDRYTCKTCPYDMRPTENRTGCRPIPIIKLEWGSPWAVLPLFLAVVGIAATLFVVITFVRYNDTPIVKASGRELSYVLLAGIFLCYATTFLMIAEPDLGTCSLRRIFLGLGMSISYAALLTKTNRIYRIFEQGKRSVSAPRFISPASQLAITFSLISLQLLGICVWFVVDPSHSVVDFQDQRTLDPRFARGVLKCDISDLSLICLLGYSMLLMVTCTVYAIKTRGVPETFNEAKPIGFTMYTTCIVWLAFIPIFFGTSQSADKLYIQTTTLTVSVSLSASVSLGMLYMPKVSSSSSTRSRTCPSASAASKPSLRRPPCPTSSRRRATSGPTERPSLSSARTLRPQRWPPNRLTSLTPTMQSSESMELSSRRRSRDPVEGNLQGPACVIQPAIARWIIKACHHKKKKKK

SEQ ID NO: 4277 - protein, 67 aa, Homo sapiens
PWAPTDVGLVLRIAKPQPSLLAAWANRVSNRRTRGRGGARLPQEPASWTIAPPGPKPQGLRSCGPQC

SEQ ID NO: 4278 - protein, 754 aa, Homo sapiens
  SITE (105): Xaa equals any amino acid
ILEWIMTHEEHHAAKTLGIGKAIAVLTSGGDAQGMNAAVRAVVRVGIFTGARVFFVHEGYQGLVDGGDHIKEATWESVSMMLQLGGTVIGSARCKDFREREGRLXAAYNLVKRGITNLCVIGGDGSLTGADTFRSEWSDLLSDLQKAGKITDEEATKSSYLNIVGLVGSIDNDFCGTDMTIGTDSALHRIMEIVDAITTTAQSHQRTFVLEVMGRHCGYLALVTSLSCGADWVFIPECPPDDDWEEHLCRRLSETRTRGSRLNIIIVAEGAIDKNGKPITSEDIKNGSRMGVEAVMALLEGTPDTPACVVSLSGNQAVRLPLMECVQVTKDVTKAMDEKKFDEALKLRGRSFMNNWEVYKLLAHVRPPVSKSGSHTVAVMNVGAPAAGMNAAVRSTVRIGLIQGNRVLVVHDGFEGLAKGQIEEAGWSYVGGWTGQGGSKLGTKRTLPKKSFEQISANITKFNIQGLVIIGGFEAYTGGLELMEGRKQFDELCIPFVVIPATVSNNVPGSDFSVGADTALNTICTTCDRIKQSAAGTKRRVFIIETMGGYCGYLATMAGLAAGADAAYIFEEPFTIRDLQANVEHLVQKMKTTVKRGLVLRNEKCNENYTTDFIFNLYSEEGKGIFDSRKNVLGHMQQGGSPTPFDRNFATKMGAKAMNWMSGKIKESYRNGRIFANTPDSGCVLGMRKRALVFQPVAELKDQTDFEHRIPKEQWWLKLRPILKILAKYEIDLDTSDHAHLEHITRKRSGEAAV

SEQ ID NO: 4279 - protein, 45 aa, Homo sapiens; identical to SEQ ID NO: 3050

SEQ ID NO: 4280 - protein, 348 aa, Homo sapiens [sequence omitted]

SEQ ID NO: 4281 - protein, 36 aa, Homo sapiens
FFSGFSLGSFFFFLGVPLGQGKYVNQELGLVGPPFK

SEQ ID NO: 4282 - protein, 188 aa, Homo sapiens; identical to SEQ ID NO: 3052

SEQ ID NO: 4283 - protein, 188 aa, Homo sapiens; identical to SEQ ID NO: 3052

SEQ ID NO: 4284 - protein, 188 aa, Homo sapiens; identical to SEQ ID NO: 3052

SEQ ID NO: 4285 - protein, 22 aa, Homo sapiens
FLQRPGPAPMQPRQALAQSRHS

SEQ ID NO: 4286 - protein, 415 aa, Homo sapiens
PKGLVPAVLWGLSLFLNLPGPIWLQPSPPPQSSPPPQPHPCHTCRGLVDSFNKGLERTIRDNFGGGNTAWEEENLSKYKDSETRLVEVLEGVCSKSDFECHRLLELSEELVESWWFHKQQEAPDLFQWLCSDSLKLCCPAGTFGPSCLPCPGGTERPCGGYGQCEGEGTRGGSGHCDCQAGYGGEACGQCGLGYFEAERNASHLVCSACFGPCARCSGPEESNCLQCKKGWALHHLKCVDIDECGTEGANCGADQFCVNTEGSYECRDCAKACLGCMGAGPGRCKKCSPGYQQVGSKCLDVDECETEVCPGENKQCENTEGGYRCICAEGYKQMEGICVKEQIPESAGFFSEMTEDELVVLQQMFFGIIICALATLAAKGDLVFTAIFIGAVAAMTGYWLSERSDRVLEGFIKGR

SEQ ID NO: 4287 - protein, 205 aa, Homo sapiens; identical to SEQ ID NO: 3054

SEQ ID NO: 4288 - protein, 74 aa, Homo sapiens
MSILIPALGHLCFLFPLIRLAKSLSFLQIFSPKKPTFGSIDFFFSIVFFFIDFCSFLMNFLSSTYFVFNLLSLF

SEQ ID NO: 4289 - protein, 74 aa, Homo sapiens
MSILIPALGHLCFLFPPIRLAKSLSFLQIFSPKKPTFGSIDFFFSIVFFFIDFCSFLMNFLSSTYFVFNLLSLF

SEQ ID NO: 4290 - protein, 122 aa, Homo sapiens
MYTTCIVWLAFIPIFFGTSQSADKLYIQTTTLTVSVSLSASVSLGMLYMPKVYIILFHPEQNVPKRKRSLKAVVTAATMSNKFTQKGNFRPNGEAKSELCENLEAPALATKQTYVTYTNHAI

SEQ ID NO: 4291 - protein, 7 aa, Homo sapiens
FATCKVW

SEQ ID NO: 4292 - protein, 169 aa, Homo sapiens
MYTTCIVWLAFIPIFFGTSQSADKLYIQTTTLTVSVSLSASVSLGMLYMPKVSSSSSTRSRTCPSASAASKPSLRRPPCPTSSRRRATSGPTERPSLSSARTLRPQRWPPNRLTSLTPTMQSSESMELSSRRRSRDPVEGNLQGPACVIQPAIARWIIKACHHKKKKKK

SEQ ID NO: 4293 - protein, 122 aa, Homo sapiens; identical to SEQ ID NO: 3057

SEQ ID NO: 4294 - protein, 123 aa, Homo sapiens
  SITE (42): Xaa equals any amino acid
MPKAFATAGWLVSLVLLVFLGFMSFVTTTFVIEAMAAANAQXHWKRMENLKEEEDDDSSTASDSDVLIRDNYERAEKRPILSVRKSWGSRGPALPSGPQGSLSSWRGPWRGSPQILAFPAPGF

SEQ ID NO: 4295 - protein, 123 aa, Homo sapiens
MPKAFATAGWLVSLVLLVFLGFMSFVTTTFVIEAMAAANAHFHWKRMENLKEEEDDDSSTASDSDVLIRDNYERAEKRPILSVRKSWGSRGPALPSGPQGSLSSWRGPWRGSPQILAFPAPGF

SEQ ID NO: 4296 - protein, 12 aa, Homo sapiens
PVTCTCLPLVLL

SEQ ID NO: 4297 - protein, 12 aa, Homo sapiens
PVTCTCLPLVLL

SEQ ID NO: 4298 - protein, 12 aa, Homo sapiens
PVTCTCLPLVLL

SEQ ID NO: 4299 - protein, 12 aa, Homo sapiens
PVTCTCLPLVLL

SEQ ID NO: 4300 - protein, 101 aa, Homo sapiens
PPTSAAQSGKKGVRMVKLNSNPSEKGTKPPSVEDGFQTVPLITPLEVNHLQLPAPEKVIVKTRTHQKRGVCWSCLNRYFFLFLGIVDSSPSQAHVQRHVSC

SEQ ID NO: 4301 - protein, 119 aa, Homo sapiens
VPSASRGGWGSGWGRGARGQQCVQCPPFFLQVLRTLGYVDEAGTVKLAGRVACAMSSHELLLTELMFDNALSTLRPEEIAALLSGLVCQSPGDAGDQLPNTLKQVGDTTPFSLPGLWHS

SEQ ID NO: 4302 - protein, 16 aa, Homo sapiens
SRGLSVYTAPVFLPST

SEQ ID NO: 4303 - protein, 263 aa, Homo sapiens; identical to SEQ ID NO: 3612

SEQ ID NO: 4304 - protein, 11 aa, Homo sapiens
LLRWPQSPLWA

SEQ ID NO: 4305 - protein, 23 aa, Homo sapiens
  SITE (9): Xaa equals any amino acid
LRPWASHFXLSGVLCPKGLMSPF

SEQ ID NO: 4306 - protein, 263 aa, Homo sapiens; identical to SEQ ID NO: 3063

SEQ ID NO: 4307 - protein, 12 aa, Homo sapiens
WLLIWASTPPFL

SEQ ID NO: 4308 - protein, 590 aa, Homo sapiens
  SITE (586): Xaa equals any amino acid
  SITE (588): Xaa equals any amino acid
  SITE (589): Xaa equals any amino acid
MWLKLFFLLLYFLVLFVLARFFEAIVWYETGIFATQLVDPVALSFKKLKTILECRGLGYSGLPEKKDVRELVEKSGDLMEGELYSALKEEEASESVSSTNFSGEMHFYELVEDTKDGIWLVQVIANDRSPLVGKIHWEKMVKKVSRFGIRTGTFNCSSDPRYCRRRGWVRSTLIMSVPQTSTSKGKVMLKEYSGRKIEVEHIFKWITAHAASRIKTIYNAEHLKEEWNKSDQYWLKIYLFANLDQPPAFFSALSIKFTGRVEFIFVNVENWDNKSYMTDIGIYNMPSYILRTPEGIYRYGNHTGEFISLQAMDSFLRSLQPEVNDLFVLSLVLVNLMAWMDLFITQGATIKRFVVLISTLGTYNSLLIISWLPVLGFLQLPYLDSFYEYSLKLLRYSNTTTLASWVRADWMFYSSHPALFLSTYLGHGLLIDYFEKKRRRNNNNDEVNANNLEWLSSLWDWYTSYLFHPIASFQNFPVESDWDEDPDLFLERLAFPDLWLHPLIPTDYIKNLPMWRFKCLGVQSEEEMSEGSQDTENDSESENTDTLSSEKEVFEDKQSVLHNSPGTASHCDAEACSCANKYCQTXPXXR

SEQ ID NO: 4309 - protein, 11 aa, Homo sapiens
FFFFFFFLVLK

SEQ ID NO: 4310 - protein, 685 aa, Homo sapiens; identical to SEQ ID NO: 3065

SEQ ID NO: 4311 - protein, 96 aa, Homo sapiens
SPGKHLWEQTLPLMENAEALPLCAVLAPLTCPGGLGVLVFPPWRRWGRLSHSQLWQNQAVAAVPSSSFLTINHSLQKISSIAVQVKTTEPHPKGTW

SEQ ID NO: 4312 - protein, 27 aa, Homo sapiens
VYLRQFSGSLKPEDAEVFKSPAASGEK

SEQ ID NO: 4313 - protein, 508 aa, Homo sapiens [sequence omitted]

SEQ ID NO: 4314 - protein, 508 aa, Homo sapiens [sequence omitted]

SEQ ID NO: 4315 - protein, 36 aa, Homo sapiens
MDPKLGRMAASLLAVLLLLLLRSAACSPHPPRPRRC

SEQ ID NO: 4316 - protein, 36 aa, Homo sapiens; identical to SEQ ID NO: 4315

SEQ ID NO: 4317 - protein, 174 aa, Homo sapiens
  SITE (21): Xaa equals any amino acid
  SITE (27): Xaa equals any amino acid
  SITE (35): Xaa equals any amino acid
  SITE (51): Xaa equals any amino acid
CLHHGAGKKDWSLFRMFSGTXTEPCPXASESRVYXDITTYNQDNETLEVHXPPTTTYQDVILGTRKTYAIYDLLDTAMINNSRNLNIQLKWKRPPENEAPPVPFLHAQRYVSGYGLQKGELSTLLYNTHPYRAFPVLLLDTVPWYLRLYVLHSVCHCVVDGVYCLWNKNGCFRG

SEQ ID NO: 4318 - protein, 90 aa, Homo sapiens
  SITE (77): Xaa equals any amino acid
PSSRWLCQPSPFPSPGPDNSSTNKMRATREKSHSQLGGPTSGWRWKNLRVWGSKSAHPTWQNPPGRRTFKSASPECXEEVSLNVSRRGTA

SEQ ID NO: 4319 - protein, 413 aa, Homo sapiens
LLVLLLLGPGGWCLAEPPRDSLREELVITPLPSGDVAATFQFRTRWDSELQREGVSHYRLFPKALGQLISKYSLRELHLSFTQGFWRTRYWGPPFLQAPSGAELWVWFQDTVTDVDKSWKELSNVLSGIFCASLNFIDSTNTVTPTASFKPLGLANDTDHYFLRYAVLPREVVCTENLTPWKKLLPCSSKAGLSVLLKADRLFHTSYHSQAVHIRPVCRNARCTSISWELRQTLSVVFDAFITGQGKKDWSLFRMFSRTLTEPCPLASESRVYVDITTYNQDNETLEVHPPPTTTYQDVILGTRKTYAIYDLLDTAMINNSRNLNIQLKWKRPPENEAPPVPFLHAQRYVSGYGLQKGELSTLLYNTHPYRAFPVLLLDTVPWYLRLYVLHSVCHCVVDGVYCLWNKNGCFRG

SEQ ID NO: 4320 - protein, 90 aa, Homo sapiens
PSSRWLCQPSPFPSPGPDNSSTNKMRATREKSHSQLGGPTSGWRWKNLRVWGSKSAHPTWQNPPGRRTFKSASPECHEEVSLNVSRRGTA

SEQ ID NO: 4321 - protein, 36 aa, Homo sapiens
LLKVLLPGGFCQVGWADFEPQTLKFFHRHPDVGPPS

SEQ ID NO: 4322 - protein, 331 aa, Homo sapiens
MLWLFQSLLFVFCFGPGNVVSQSSLTPLMVNGILGESVTLPLEFPAGEKVNFITWLFNETSLAFIVPHETKSPEIHVTNPKQGKRLNFTQSYSLQLSNLKMEDTGSYRAQISTKTSAKLSSYTLRILRQLRNIQVTNHSQLFQNMTCELHLTCSVEDADDNVSFRWEALGNTLSSQPNLTVSWDPRISSEQDYTCIAENAVSNLSFSVSAQKLCEDVKIQYTDTKMILFMVSGICIVFGFIILLLLVLRKRRDSLSLSTQRTQGPESARNLEYVSVSPTNNTVYASVTHSNRETEIWTPRENDTITIYSTINHSKESKPTFSRATALDNVV

SEQ ID NO: 4323 - protein, 331 aa, Homo sapiens; identical to SEQ ID NO: 4322

SEQ ID NO: 4324 - protein, 314 aa, Homo sapiens
PRVRSQAPVFTAESMLWLFQSLLFVFCFGPGNVVSQSSLTPLMVNGILGESVTLPLEFPAGEKVNFITWLFNETSLAFIVPHETKSPEIHVTNPKQGKRLNFTQSYSLATQQPGRWEDTGSYRAQISTKTSAKLSSYTLRILRQLRNIQVTSHSQLFQNMTCELHLTCSVEDADDNVSFRWEALGNTLSSQPNLTVSWDPRISSEQDYTCIAENAVSNLSFSVSAQKLCEDVKIQYTDTKMILFMVSGICIVFGFIILLLLVLRKRRDSLSLSTQRTQGPESARNLEYVSVSPTNNTVYASVTHSNRGNRNLDT

SEQ ID NO: 4325 - protein, 147 aa, Homo sapiens; identical to SEQ ID NO: 3069

SEQ ID NO: 4326 - protein, 21 aa, Homo sapiens
LQRIGFLMVFVLLIKCADIEF

SEQ ID NO: 4327 - protein, 9 aa, Homo sapiens
LPQPRTEFF

SEQ ID NO: 4328 - protein, 41 aa, Homo sapiens; identical to SEQ ID NO: 3071

SEQ ID NO: 4329 - protein, 122 aa, Homo sapiens
  SITE (36): Xaa equals any amino acid
  SITE (39): Xaa equals any amino acid
LYPFLGAPWASITTSRRATHGARRFREGKPLILGIXKQXLKCRACGVNCHKQCKDRLSVECRRRAQSVSLEGSAPSPSPMHSHHHRAFSFSLPRPGRRGSRPPEIREEEVQTVEDGVFDIHL

SEQ ID NO: 4330 - protein, 18 aa, Homo sapiens
GLLEGAPGKPESPLGLFS

SEQ ID NO: 4331 - protein, 198 aa, Homo sapiens
MALRHLALLAGLLVGVASKSMENTAQLPECCVDVVGVNASCPGASLCGPGCYRRWNADGSASCVRCGNGTLPAYNGSECRSFAGPGAPFPMNRSSGTPGRPHPGAPRVAASLFLGTFFISSGLILSVAGFFYLKRSSKLPRACYRRNKAPALQPGEAAAMIPPPQSSVRKPRYVRRERPLDRATDPAAFPGEARISNV

SEQ ID NO: 4332 - protein, 445 aa, Homo sapiens
EQVSQVPGRSVTQARYSQPHLILFPWHPPAQCDIVTLNPSVFSNARQIPFRQDNCDISVPDCKYLLSLKLLLLAIVSFSFFICKMGIIQSILATSRDCYSFKKKPIPKKPTMLALAKILLISTLFYSLLSGSHGKENQDINTTQNIAEVFKTMENKPISLESEANLNSDKENITTSNLKASHSPPLNLPNNSHGITDFSSNSSAEHSLGSLKPTSTISTSPPLIHSFVSKVPWNAPIADEDLLPISAHPNATPALSSENFTWSLVNDTVKTPDNSSITVSILSSEPTSPSVTPLIVEPSGWLTTNSDSFTGFTPYQEKTTLQPTLKFTNNSKLFPNTSDPQKENRNTGIVFGAILGAILGVSLLTLVGYLLCGKRKTDSFSHRRLYDDRNEPVLRLDNAPEPYDVSFGNSSYYNPTLNDSAMPESEENARDGIPMDDIPPLRTSV

SEQ ID NO: 4333 - protein, 90 aa, Homo sapiens; identical to SEQ ID NO: 3074

SEQ ID NO: 4334 - protein, 71 aa, Homo sapiens
  SITE (34): Xaa equals any amino acid
MLPAVPLVCCCLVVWAKVPRQEILLLGQYSAIGXLGPLGGTRVDQTDSIFLSSRKRKEIGVARAGNGYARL

SEQ ID NO: 4335 - protein, 154 aa, Homo sapiens
MAWCALQLAVVVVVLVVVVVVGSPCVCPLDVVLAVVACAQAGSRAGGARRGVDDLGGRVLLLAWGTRAAEQRAPQQLQRRGRPAHVQARAHLALLRLGHHGVVEVPDNGVGRPGHRHEGEQGGEKEQHACHDGDLGLGRVVLHAVGALGAHQRH

SEQ ID NO: 4336 - protein, 578 aa, Homo sapiens
MAAAMPLALLVLLLLGPGGWCLAEPPRDSLREELVITPLPSGDVAATFQFRTRWDSELQREGVSHYRLFPKALGQLISKYSLRELHLSFTQGFWRTRYWGPPFLQAPSGAELWVWFQDTVTDVDKSWKELSNVLSGIFCASLNFIDSTNTVTPTASFKPLGLANDTDHYFLRYAVLPREVVCTENLTPWKKLLPCSSKAGLSVLLKADRLFHTSYHSQAVHIRPVCRNARCTSISWELRQTLSVVFDAFITGQGKKDWSLFRMFSRTLTEPCPLASESRVYVDITTYNQDNETLEVHPPPTTTYQDVILGTRKTYAIYDLLDTAMINNSRNLNIQLKWKRPPENEAPPVPFLHAQRYVSGYGLQKGELSTLLYNTHPYRAFPVLLLDTVPWYLRLYVHTLTITSKGKENKPSYIHYQPAQDRLQPHLLEMLIQLPANSVTKVSIQFERALLKWTEYTPDPNHGFYVSPSVLSALVPSMVAAKPVDWEESPLFNSLFPVSDGSNYFVRLYTEPLLVNLPTPDFSMPYNVICLTCTVVAVCYGSFYNLLTRTFHIEEPRTGGLAKRLANLIRRARGVPPL

SEQ ID NO: 4337 - protein, 108 aa, Homo sapiens; identical to SEQ ID NO: 3078

SEQ ID NO: 4338 - protein, 167 aa, Homo sapiens; identical to SEQ ID NO: 3689

SEQ ID NO: 4339 - protein, 32 aa, Homo sapiens
SDLSVDFCDARQGAEPMEKRQQRGLFTVPGLL

SEQ ID NO: 4340 - protein, 167 aa, Homo sapiens; identical to SEQ ID NO: 3079

SEQ ID NO: 4341 - protein, 167 aa, Homo sapiens; identical to SEQ ID NO: 3689

SEQ ID NO: 4342 - protein, 69 aa, Homo sapiens
MACGRTLYFWSTCCVVVPSSSQWCGQSDIYKKHQQQMEKPFCISLTFQSCLLNQKKSCKENVLCGSGLI

SEQ ID NO: 4343 - protein, 3 aa, Homo sapiens
KTT

SEQ ID NO: 4344 - protein, 569 aa, Homo sapiens
ARCTVDDESGLGAPGRGRAGRGRAGRQSWVRARASGARRDSEMQAARMAASLGRQLLRLGGGSSRLTALLGQPRPGPARRPYAGGAAQLALDKSDSHPSDALTRKKPAKAESKSFAVGMFKGQLTTDQVFPYPSVLNEEQTQFLKELVEPVSRFFEEVNDPAKNDALEMVEETTWQGLKELGAFGLQVPSELGGVGLCNTQYARLVEIVGMHDLGVGITLGAHQSIGFKGILLFGTKAQKEKYLPKLASGETVAAFCLTEPSSGSDAASIRTSAVPSPCGKYYTLNGSKLWISNGGLADIFTVFAKTPVTDPATGAVKEKITAFVVERGFGGITHGPPEKKMGIKASNTAEVFFDGVRVPSENVLGEVGSGFKVAMHILNNGRFGMAAALAGTMRGIIAKAVDHATNRTQFGEKIHNFGLIQEKLARMVMLQYVTESMAYMVSANMDQGATDFQIEAAISKIFGSEAAWKVTDECIQIMGGMGFMKEPGVERVLRDLRIFRIFEGTNDILRLFVALQGCMAGRAGQRPESQRTCPPGVESEWRAGSTGSGAVCHCGGGQADKTQEGDCQ

SEQ ID NO: 4345 - protein, 144 aa, Homo sapiens
  SITE (113): Xaa equals any amino acid
MDMRVPAQLLGLLLLWLRGARCDMQMTQSPSSLSASVGDRVTITCRTSQSIGKFLNWYQQKPGQAPKLLISGASILQTGVPSRFSGSGSATYFTLTINDLHPEDSATYYCQQXYTTPLFGQGTKVEIKRTVAAPSVFIFPPSDE

SEQ ID NO: 4346 - protein, 235 aa, Homo sapiens; identical to SEQ ID NO: 3083

SEQ ID NO: 4347 - protein, 186 aa, Homo sapiens; identical to SEQ ID NO: 3084

SEQ ID NO: 4348 - protein, 113 aa, Homo sapiens
EELRESAAAGSADAMDNVQPKIKHRPFCFSVKGHVKMLRLDIINSLVTTVFMLIVSVLALIPETTTLTVGGGVFALVTAVCCLADGALIYRKLLFNPSGPYQKKPVHEKKEVL

SEQ ID NO: 4349 - protein, 186 aa, Homo sapiens; identical to SEQ ID NO: 3084

SEQ ID NO: 4350 - protein, 175 aa, Homo sapiens; identical to SEQ ID NO: 3085

SEQ ID NO: 4351 - protein, 202 aa, Homo sapiens
  SITE (4): Xaa equals any amino acid
SRVXPTRPPHPSRRLTQGRWVRKSRVAMEKIPVSAFLLLVALSYTLARDTTVKPGAKKDTKDSRPKLPQTLSRGWGDQLIWTQTYEEALYKSKTSNKPLMIIHHLDECPHSQALKKVFAENKEIQKLAEQFVLLNLVYETTDKHLSPDGQYVPRIMFVDPSLTVRADITGRYSNRLYAYEPADTALLLDNMKKALKLLKTEL

SEQ ID NO: 4352 - protein, 153 aa, Homo sapiens; identical to SEQ ID NO: 3086

SEQ ID NO: 4353 - protein, 153 aa, Homo sapiens; identical to SEQ ID NO: 3086

SEQ ID NO: 4354 - protein, 79 aa, Homo sapiens
  SITE (2): Xaa equals any amino acid
  SITE (11): Xaa equals any amino acid
KXREAADMDWXARPTEGNLRLGHKGPLGKARLASSLGGMASRPITRTQRVDLLQMCLQLTETKVSRSGAQFWPSVEGMI

SEQ ID NO: 4355 - protein, 48 aa, Homo sapiens
  SITE (11): Xaa equals any amino acid
  SITE (42): Xaa equals any amino acid
LRKSPQSPLKXGFHCKHWESTEMLKEGKRESHSTQPLIGKHXQYYCKK

SEQ ID NO: 4356 - protein, 104 aa, Homo sapiens
  SITE (45): Xaa equals any amino acid
MPRHSLYIIIGALCVAFILMLIILIVGICRISRIEYQGSSRPAYXEFYNCRSIDSEFSNAIASIRHARFGKKSRPAMYDVSPIAYEDYSPDDKPLVTLIKTKDL

SEQ ID NO: 4357 - protein, 104 aa, Homo sapiens; identical to SEQ ID NO: 3087

SEQ ID NO: 4358 - protein, 81 aa, Homo sapiens; identical to SEQ ID NO: 3088

SEQ ID NO: 4359 - protein, 41 aa, Homo sapiens
SLVLVVVTNEIVKLHEIRVRVRYQKRQKLQFETKLGMNSPF

SEQ ID NO: 4360 - protein, 58 aa, Homo sapiens
MWFYFLSVSLTLPPVLAPAPPPAPTTLCLLLFLGLLYNSTCIHCVHTTSQTKTQRQTL

SEQ ID NO: 4361 - protein, 11 aa, Homo sapiens
MLAGSSPALVF

SEQ ID NO: 4362 - protein, 11 aa, Homo sapiens
MLAGSSPALVF

SEQ ID NO: 4363 - protein, 112 aa, Homo sapiens
ARARLEFSGTILVHCSLNLLVSSNPPTSASQVAETAGTCHHAQLIFVFFVAMGSHYVACSDWSETPGLKQSSCLCLPKCWGYRHEPQCLAHKCILKGNFKTPLHMENDNLFS

SEQ ID NO: 4364 - protein, 160 aa, Homo sapiens
  SITE (111): Xaa equals any amino acid
  SITE (156): Xaa equals any amino acid
TLPPAPAYCVFSHEELICKMAAFPETLDLNLAVAVHKEMFIMVQEERRLRKALLEKGVTEAEREAFELLPDDERQCIKCKTTCFLSALACYDCPDGLVCLSHINDLCKCSXSRQYLRYRYTLDELPTMLHKLKIRAESFDTWANKVRVALEVEDGXKRSE

SEQ ID NO: 4365 - protein, 53 aa, Homo sapiens
KVDSFSKIVALVKTTVVSTRKSDDKLPCTLVCADNWHTMGHQSVGIHESDKLV

SEQ ID NO: 4366 - protein, 126 aa, Homo sapiens; identical to SEQ ID NO: 3097

SEQ ID NO: 4367 - protein, 126 aa, Homo sapiens; identical to SEQ ID NO: 3097

SEQ ID NO: 4368 - protein, 361 aa, Homo sapiens; identical to SEQ ID NO: 3099

SEQ ID NO: 4369 - protein, 37 aa, Homo sapiens
MFTWSGLACLIFLNCTLNWPIEAFLPLRKSITRRRSS

SEQ ID NO: 4370 - protein, 178 aa, Homo sapiens
RCSSKSPTALPIFLELTAGVLAFVFKDWIKDQLYFFINNNIRAYRDDIDLQNLIDFTQEYWQCCGAFGADDWNLNIYFNCTDSNASRERCGVPFSCCTKDPAEDVINTQCGYDARQKPEVDQQIVIYTKGCVPQFEKWLQDNLTIVAGIFIGIALLQIFGICLAQNLVSDIEAVRASW

SEQ ID NO: 4371 - protein, 85 aa, Homo sapiens [sequence omitted]

SEQ ID NO: 4372 - protein, 3 aa, Homo sapiens
LIP

SEQ ID NO: 4373 - protein, 50 aa, Homo sapiens; identical to SEQ ID NO: 3102

SEQ ID NO: 4374 - protein, 300 aa, Homo sapiens
VMDLVLRVADYYFFTPYVYPATWPEDDIFRQAISLLIVTNVGAYILYFFCATLSYYFVFDHALMKHPQFLKNQVRREIKFTVQALPWISILTVALFLLEIRGYSKLHDDLGEFPYGLFELVVSIISFLFFTDMFIYWIHRGLHHRLVYKRLHKPHHIWKIPTPFASHAFHPIDGFLQSLPYHIYPFIFPLHKVVYLSLYILVNIWTISIHDGDFRVPQILQPFINGSAHHTDHHMFFDYNYGQYFTLWDRIGGSFKNPSSFEGKGPLSYVKEMTEGKRSSHSGNGCKNEKLFNGEFTKTE

SEQ ID NO: 4375 - protein, 50 aa, Homo sapiens; identical to SEQ ID NO: 3102

SEQ ID NO: 4376 - protein, 88 aa, Homo sapiens
WIQRIRHEPGRCGPENLALQATQRGTRFSVPMCKSSRQYTYTSVHMCQCACERVEWRGSLTPARALHNHLTEQWFPHGFPFLSRFFTY

SEQ ID NO: 4377 - protein, 192 aa, Homo sapiens [sequence omitted]

SEQ ID NO: 4378 - protein, 141 aa, Homo sapiens
TYIFRRVIGRCTVFGKVFRAVVIASSPASVPAPHTPGADRRNLPCRQLQALNIERRAQLEINLYTRLCGFGIDVKELYALIGRAGTRITVFPVGGIEILRKRGMDFDLSPDHIVIFKTQRGDIVSDVPDGQRGRWLGTCTR

SEQ ID NO: 4379 - protein, 672 aa, Homo sapiens; identical to SEQ ID NO: 3105

SEQ ID NO: 4380 - protein, 283 aa, Homo sapiens
MDLWPGAWMLLLLLFLLLLFLLPTLWFCSPSAKYFFKMAFYNGWILFLAVLAIPVCAVRGRNVENMKILRLMLLHIKYLYGIRVEVRGAHHFPPSQPYVVVSNHQSSLDLLGMMEVLPGRCVPIAKRELLWAGSAGLACWLAGVIFIDRKRTGDAISVMSEVAQTLLTQDVRVWVFPEGTRNHNGSMLPFKRGAFHLAVQAQVPIVPIVMSSYQDFYCKKERRFTSGQCQVRVLPPVPTEGLTPDDVPALADRVRHSMLTVFREISTDGRGGGDYLKKPGGGG

SEQ ID NO: 4381 - protein, 110 aa, Homo sapiens
  SITE (5): Xaa equals any amino acid
  SITE (8): Xaa equals any amino acid
  SITE (14): Xaa equals any amino acid
  SITE (96): Xaa equals any amino acid
SFLVXLWXLEVIIXKVFRHTAGLNPEVSCFETIRSCARGALALLFLLGTTWIFGVLHVVHASVVTAYLFTVSNAFQGMFIFLFLCVLSRKIQEEYXRLFKNVPCCFGCLR

SEQ ID NO: 4382 - protein, 644 aa, Homo sapiens
MERGLPLLCAVLALVLAPAGAFRNDKCGDTIKIESPGYLTSPGYPHSYHPSEKCEWLIQAPDPYQRIMINFNPHFDLEDRDCKYDYVEVFDGENENGHFRGKFCGKIAPPPVVSSGPFLFIKFVSDYETHGAGFSIRYEIFKRGPECSQNYTTPSGVIKSPGFPEKYPNSLECTYIVFAPKMSEIILEFESFDLEPDSNPPGGMFCRYDRLEIWDGFPDVGPHIGRYCGQKTPGRIRSSSGILSMVFYTDSAIAKEGFSANYSVLQSSVSEDFKCMEALGMESGEIHSDQITASSQYSTNWSAERSRLNYPENGWTPGEDSYREWIQVDLGLLRFVTAVGTQGAISKETKKKYYVKTYKIDVSSNGEDWITIKEGNKPVLFQGNTNPTDVVVAVFPKPLITRFVRIKPATWETGISMRFEVYGCKITDYPCSGMLGMVSGLISDSQITSSNQGDRNWMPENIRLVTSRSGWALPPAPHSYINEWLQIDLGEEKIVRGIIIQGGKHRENKVFMRKFKIGYSNNGSDWKMIMDDSKRKAKSFEGNNNYDTPELRTFPALSTRFIRIYPERATHGGLGLRMELLGCEVEAPTAGPTTPNGNLVDECDDDQANCHSGTGDDFQLTGGTTVLATEKPTVIDSTIQSGIK

SEQ ID NO: 4383 - protein, 68 aa, Homo sapiens
PILITIIAMSALGVLLGAVCGVVLYCACWHNGMSERNLSALENYNFELVDGVKLKKDKLNTQSTYSEA

SEQ ID NO: 4384 - protein, 701 aa, Homo sapiens
SCRSVGCGTQTSAGLACGDTCSPLRASGSPACLHWFVSRAGLILSICDLQPVKQENEKPLPENMDAFEKVRTKLETQPQEEYEIINVEVKHGGFVYYQEGCCLVRSKDEEADNDNYEVLFNLEELKLDQPFIDCIRVAPDEKYVAAKIRTEDSEASTCVIIKLSDQPVMEASFPNVSSFEWVKDEEDEDVLFYTFQRNLRCHDVYRATFGDNKRNERFYTEKDPSYFVFLYLTKDSRFLTINIMNKTTSEVWLIDGLSPWDPPVLIQKRIHGVLYYVEHRDDELYILTNVGEPTEFKLMRTAADTPAIMNWDLFFTMKRNTKVIDLDMFKDHCVLFLKHSNLLYVNVIGLADDSVRSLKLPPWACGFIMDTNSDPKNCPFQLCSPIRPPKYYTYKFAEGKLFEETGHEDPITKTSRVLRLEAKSKDGKLVPMTVFHKTDSEDLQKKPLLVHVYGAYGMDLKMNFRPERRVLVDDGWILAYCHVRGGGELGLQWHADGRLTKKLNGLADLEACIKTLHGQGFSQPSLTTLTAFSAGGVLAGALCNSNPELVRAVTLEAPFLDVLNTMMDTTLPLTLEELEEWGNPSSDEKHKNYIKRYCPYQNIKPQHYPSIHITAYENDERVPLKGIVSYTEKLKEAIAEHAKDTGEGYQTPNIILDIQPGGNHVIEDSHKKITAQIKFLYEELGLDSTSVFEDLKKYLKF

SEQ ID NO: 4385 - protein, 68 aa, Homo sapiens
  SITE (67): Xaa equals any amino acid
PILITIIAMSALGVLLGAVCGVVLYCACWHNGMSERNLSALENYNFELVDGVKLKKDQLNTQSTYSXA

SEQ ID NO: 4386 - protein, 300 aa, Homo sapiens
  SITE (231): Xaa equals any amino acid
  SITE (265): Xaa equals any amino acid
MEPGAAARAWSLLWLLLPLLGPACASGPRTLVLLDNLNLRETHSLFFRSLKDRAFELTFKTADDPSLSLIKYGEFLYDNLIIFSPSVEDFGGNINVETISTFIDGGGSVLVAASSDIGDPLRELGSECGIEFDEEKTAVIDHHNYDISDLGQHTLIVADPENLLKAPTIVGRSSLNPILFRGVGMVADPDNPLVLDILTGSSTSYSFFPDKPITQYPHAVGKNTLLIAGLXARNNARVIFSGSLDFFSDAFFNSAVQKGRARLPXVLPKRATMNLACGPVPLGCSRKKGVLPRWGLCPTI

SEQ ID NO: 4387 - protein, 39 aa, Homo sapiens; identical to SEQ ID NO: 3110

SEQ ID NO: 4388 - protein, 23 aa, Homo sapiens
PTTIPLLPMPLISLAPTSASFGS

SEQ ID NO: 4389 - protein, 23 aa, Homo sapiens
VLERGKDATLQKQVMLVLMSSLK

SEQ ID NO: 4390 - protein, 167 aa, Homo sapiens [sequence omitted]

SEQ ID NO: 4391 - protein, 38 aa, Homo sapiens; identical to SEQ ID NO: 3114

SEQ ID NO: 4392 - protein, 182 aa, Homo sapiens
QRWLWTSSTSPCWIRAFLPPAGQVWPCSLGRAPAPLTTLQLTMQLMPKLWCPVCSSPGSHCHLQRGSLLRPTLLHLAPPWLLAWPNLAFCAMLELELLLFFRGGNRVESGKGLAPKCCCCGFFAFSKDALPGPKLQTAVLSKQVRSLGFGAHLLSGSISILLLATSGQRPPQPHIARCWQKG

SEQ ID NO: 4393 - protein, 32 aa, Homo sapiens
VLTQCFEPYQDPSHHTELHEPYFQFEKKFVLR

SEQ ID NO: 4394 - protein, 14 aa, Homo sapiens
MVAFVVLTMCYTLL

SEQ ID NO: 4395 - protein, 32 aa, Homo sapiens; identical to SEQ ID NO: 4393

SEQ ID NO: 4396 - protein, 624 aa, Homo sapiens
  SITE (623): Xaa equals any amino acid
  SITE (624): Xaa equals any amino acid
MAEGRELILDLEKNEQLFAPSYTETHYTSSGNPQTTTRKLEDHCFYHGTVRETELSSVTLSTCRGIRGLITVSSNLSYVIEPLPDSKGQHLIYRSEHLKPPPGNCGFEHSKPTTRDWALQFTQQTKKRPRRMKREDLNSMKYVELYLVADYLEFQKNRRDQDATKHKLIEIANYVDKFYRSLNIRIALVGLEVWTHGNMCEVSENPYSTLWSFLSWRRKLLAQKYHDNAQLITGMSFHGTTIGLAPLMAMCSVYQSGGVNMDHSENAIGVAATMAHEMGHNFGMTHDSADCCSASAADGGCIMAAATGHPFPKVFNGCNRRELDRYLQSGGGMCLSNMPDTRMLYGGRRCGNGYLEDGEECDCGEEEECNNPCCNASNCTLRPGAECAHGSCCHQCKLLAPGTLCREQARQCDLPEFCTGKSPHCPTNFYQMDGTPCEGGQAYCYNGMCLTYQEQCQQLWGPGARPAPDLCFEKVNVAGDTFGNCGKDMNGEHRKCNMRDAKCGKIQCQSSEARPLESNAVPIDTTIIMNGRQIQCRGTHVYRGPEEEGDMLDPGLVMTGTKCGYNHICFEGQCRNTSFFETEGCGKKCNGHGVCNNNQNCHCLPGLGPAFFNTPGQRGSIDXX

SEQ ID NO: 4397 - protein, 251 aa, Homo sapiens
  SITE (170): Xaa equals any amino acid
  SITE (179): Xaa equals any amino acid
  SITE (182): Xaa equals any amino acid
  SITE (183): Xaa equals any amino acid
  SITE (184): Xaa equals any amino acid
  SITE (194): Xaa equals any amino acid
  SITE (198): Xaa equals any amino acid
  SITE (200): Xaa equals any amino acid
  SITE (212): Xaa equals any amino acid
MPGGAGAARLCLLAFALQPLRPRAAREPGWTRGSEEGSPKLQHELIIPQWKTSESPVREKHPLKAELRVMAEGRELILDLEKNEQLFAPSYTETHYTSSGNPQTTTRKLEDHCFYHGTVRETELSSVTLSTCRGIRGLITVSSNLSYVIEPLPDSKGQHLIYRSEHLKPXPGNCGFEHXKPXXXDWALQFTQQXKKRXRXMKREDLNSMKYXELYLVADYLEFQKNRRDQDATKHKLIELSLIHISTWGGL

SEQ ID NO: 4398 - protein, 68 aa, Homo sapiens [sequence omitted]

SEQ ID NO: 4399 - protein, 128 aa, Homo sapiens
  SITE (112): Xaa equals any amino acid
  SITE (128): Xaa equals any amino acid
MLMYYCCRQNNKLGQLKPSALPSKLRQQFSCPFRVSQNSGTGHANPTFKLQTPQGKRKVINTPEILRKPSQPPPRPPPDYLRGGSPPAPLPAHLSRAARNSPGPGSQIERTXSSRRPPPSRPIPPPFX

SEQ ID NO: 4400 - protein, 124 aa, Homo sapiens
MSFGVLGAGLPRGHPPLLGPPWPDPFCGETGCPWSLRNATRLVGMAWGRRQRQETKMAGGGQAYHNGRDLPLGPGRPGSAATGIWWRGGYPAHLGVVAPELLSIQTLVWGLGPLTGDRASVGEF

SEQ ID NO: 4401 - protein, 429 aa, Homo sapiens
KVRLQVPVRNSRVDPRVRIAVIYGRYLRKLTKVTQDSLAQATQLAEERIGNVRTVRAFGKEMTEIEKYASKVDHVMQLARKEAFARAGFFGATGLSGNLIVLSVLYKGGLLMGSAHMTVGELSSFLMYAFWVGISIGGLSSFYSELMKGLGAGGRLWELLEREPKLPFNEGVILNEKSFQGALEFKNVHFAYPARPEVPIFQDFSLSIPSGSVTALVGPSGSGKSTVLSLLLRLYDPASGTISLDGHDIRQLNPVWLRSKIGTVSQEPILFSCSIAENIAYGADDPSSVTAEEIQRVAEVANAVAFIRNFPQGFNTVVGEKGVLLSGGQKQRIAIARALLKNPKILLLDEATSALDAENEYLVQEALDRLMDGRTVLVIAHRLSTIKNANMVAVLDQGKITEYGKHEELLSKPNGIYRKLMNKQSFISA

SEQ ID NO: 4402 - protein, 612 aa, Homo sapiens
MAAAGRLPSSWALFSPLLAGLALLGVGPVPARALHNVTAELFGAEAWGTLAAFGDLNSDKQTDLFVLRERNDLIVFLADQNAPYFKPKVKVSFKNHSALITSVVPGDYDGDSQMDVLLTYLPKNYAKSELGAVIFWGQNQTLDPNNMTILNRTFQDEPLIMDFNGDLIPDIFGITNESNQPQILLGGNLSWHPALTTTSKMRIPHSHAFIDLTEDFTADLFLTTLNATTSTFQFEIWENLDGNFSVSTILEKPQNMMVVGQSAFADFDGDGHMDHLLPGCEDKNCQKSTIYLVRSGMKQWVPVLQDFSNKGTLWGFVPFVDEQQPTEIPIPITLHIGDYNMDGYPDALVILKNTSGSNQQAFLLENVPCNNASCEEARRMFKVYWELTDLNQIKDAMVATFFDIYEDGILDIVVLSKGYTKNDFAIHTLKNNFEADAYFVKVIVLSGLCSNDCPRKITPFGVNQPGPYIMYTTVDANGYLKNGSAGQLSQSAHLALQLPYNVLGLGRSANFLDHLYVGIPRPSGEKSIRKQEWTAIIPNSQLIVIPYPHNVPRSWSAKLYLTPSNIVLLTAIALIGVCVFILAIIGILHWQEKKADDREKRQEAHRFHFDAM

SEQ ID NO: 4403 - protein, 612 aa, Homo sapiens; identical to SEQ ID NO: 4402

SEQ ID NO: 4404 - protein, 42 aa, Homo sapiens; identical to SEQ ID NO: 3127

SEQ ID NO: 4405 - protein, 14 aa, Homo sapiens
IFVVCLFVLKTESG

SEQ ID NO: 4406 - protein, 49 aa, Homo sapiens
MVRVTLAAPSTGAGVWILKSKQGFPRCNWTLRVWVFLSPALFNHSGGWD

SEQ ID NO: 4407 - protein, 187 aa, Homo sapiens
  SITE (5): Xaa equals any amino acid
  SITE (88): Xaa equals any amino acid
  SITE (107): Xaa equals any amino acid
  SITE (158): Xaa equals any amino acid
MGESXQGGEELLCHPEHVRGVPALLQHSTGDIEVGLVWERHHHVVDVFPALGPHVSQQMSRDGSPEVDVSVSVSAMQCAADEGMEVPXRGALAVGRGVPDRPRRWGXCTRSASSPRVCEAVLLVGFIAEGSEILVQRFQRDARSVVPALPGKQEHGVXREEARMLVRSGSRDQQVAVLLGRQTLAVE

SEQ ID NO: 4408 - protein, 53 aa, Homo sapiens
VKLKSEDSLVSNKYNYYGRFTFQVEMTIVLSTVDFTRGSVQVEIKKRYMLNYL

SEQ ID NO: 4409 - protein, 56 aa, Homo sapiens
YSLFIVVISFGIACLRVINTVSWTRDSLISSYYNKIILENILLIIYFTKKQYYNFL

SEQ ID NO: 4410 - protein, 70 aa, Homo sapiens
IQHGFLNFFISNTHERSWHRETVMKAQSTGPVTRFSIIAANLKINNLPLKIQQVPKILLRIGIIQPMKTF

SEQ ID NO: 4411 - protein, 61 aa, Homo sapiens
ERFRNQQSVTIVFHLWNGKTEVSHSEHFGKVVCIRGCFWKHPLEKLPEESPCQVVPDFFFS

SEQ ID NO: 4412 - protein, 68 aa, Homo sapiens
SYNAKKVFFKDPTKLRILLYISVSTPIYKLFFLPETLLHPVWALTRSFSKEQTGRSKLALQGASELRI

SEQ ID NO: 4413 - protein, 62 aa, Homo sapiens [sequence omitted]

SEQ ID NO: 4414 - protein, 68 aa, Homo sapiens; identical to SEQ ID NO: 4412

SEQ ID NO: 4415 - protein, 59 aa, Homo sapiens
ERIRDRSKSIKIFPTTNNLHFRTILAPLFFFHNFDCNINSGNVTSRKVLSHQCSVYFLE

SEQ ID NO: 4416 - protein, 76 aa, Homo sapiens
SYNAKKVFFKDPTKLRILLYISVSTPIYKLFFLPETLLHPVWALTRSFSKEQTGRSKLALQGASEPVSYTHLNHHR

SEQ ID NO: 4417 - protein, 56 aa, Homo sapiens
SHALKKVSILVIVAYKIHNLKCTTTKVKQNFTHYKYCNITWKSSFSIKGLDWIKFP

SEQ ID NO: 4418 - protein, 54 aa, Homo sapiens
  SITE (20): Xaa equals any amino acid
PDFRFLRRACSSYCSSVLSXGGCSGPLTVSYSLLSAQFCTQLVEAAILSPSRKL

SEQ ID NO: 4419 - protein, 54 aa, Homo sapiens
PDFRFLRRACSSYCSSVLSCGGCSGPLTVSYSLLSAQFCTQLVEAAILSPSRKL

SEQ ID NO: 4420 - protein, 95 aa, Homo sapiens
RVEMCIRDRAWATQLDSVSKKKKKMKYQHQFPASLLGHTGVPQVGCRLVADGQRWILLSFQSDHWLGPSAGARFQLAASSLEELHLVTQCAEPTA

SEQ ID NO: 4421 - protein, 50 aa, Homo sapiens
FPVVCWIFLGKCMNKVFSSKSCTWTSLGMFSPEISISLHWTFVGKVAASY

SEQ ID NO: 4422 - protein, 43 aa, Homo sapiens
KKLNPSIHRLSDLYKAKVIFALNVSKIPLLIILEFTSDRLRAV

SEQ ID NO: 4423 - protein, 45 aa, Homo sapiens; identical to SEQ ID NO: 3132

SEQ ID NO: 4424 - protein, 95 aa, Homo sapiens
  SITE (2): Xaa equals any amino acid
LXLDPLGRLIYRFVCNQHLFCPPTFTLQPISALYLLSNLTPVPYGLAPRLTQLCSFKTICNQWVHTSRYNLWLGNYRHFFFLFPILSLFWFPYVA

SEQ ID NO: 4425 - protein, 7 aa, Homo sapiens
CPWVRNV

SEQ ID NO: 4426 - protein, 285 aa, Homo sapiens
MVVAGVVVLILALVLAWLSTYVADSGSNQLLGAIVSAGDTSVLHLGHVDHLVAGQGNPEPTELPHPSEGNDEKAEEAGEGRGDSTGEAGAGGGVEPSLEHLLDIQGLPKRQAGAGSSSPEAPLRSEDSTCLPPSPGLITVRLKFLNDTEELAVARPEDTVGALKSKYFPGQESQMKLIYQGRLLQDPARTLRSLNITDNCVIHCHRSPPGSAVPGPSASLAPSATEPPSLGVNVGSLMVPVFVVLLGVVWYFRINYRQFFTAPATVSLVGVTVFFSFLVFGMYGR

SEQ ID NO: 4427 - protein, 81 aa, Homo sapiens; identical to SEQ ID NO: 3134

SEQ ID NO: 4428 - protein, 285 aa, Homo sapiens; identical to SEQ ID NO: 4426

SEQ ID NO: 4429 - protein, 285 aa, Homo sapiens; identical to SEQ ID NO: 4426

SEQ ID NO: 4430 - protein, 355 aa, Homo sapiens
MTLLSLLGRIMRYFLLRPETLFLLCISLALWSYFFHTDEVKTIVKSSRDAVKMVKGKVAEIMQNDRLGGLDVLEAEFSKTWEFKNHNVAVYSIQGRRDHMEDRFEVLTDLANKTHPSIFGIFDGHGGETAAEYVKSRLPEALKQHLQDYEKDKENSVLSYQTILEQQILSIDREMLEKLTVSYDEAGTTCLIALLSDKDLTVANVGDSRGVLCDKDGNAIPLSHDHKPYQLKERKRIKRAGGFISFNGSWRVQGILAMSRSLGDYPLKNLNVVIPDPDILTFDLDKLQPEFMILASDGLWDAFSNEEAVRFIKERLDEPHFGAKSIVLQSFYRGCPDNITVMVVKFRNSSKTEEQ

SEQ ID NO: 4431 - protein, 150 aa, Homo sapiens
  SITE (23): Xaa equals any amino acid
  SITE (24): Xaa equals any amino acid
  SITE (25): Xaa equals any amino acid
  SITE (26): Xaa equals any amino acid
LARVMRSRLLLSVAHLPTIRETXXXXLLGGPGQEPPPSPSLDDYVRSISRLAQPTSVLDKATAQGQPRPPHRPAQACRKGRPAVSLRDITARFSGQQPTLPMADTVDPLDWVFGESQEKQPSQRDLPRRTGPSAGLWGPHRQMDSSKPWG

SEQ ID NO: 4432 - protein, 149 aa, Homo sapiens
MFCPLKLILLPVLLDYSLGLNDLNVSPPELTVHVGDSALMGCVFQSTEDKCIFKIDWTLSPGEHAKDEYVLYYYSNLSVPIGRFQNRVHLMGDILCNDGSLLLQDVQEADQGTISVKSASKGRARCSRRRWYCMCFQRSPKSSWSMWVD

SEQ ID NO: 4433 - protein, 227 aa, Homo sapiens; identical to SEQ ID NO: 3137

SEQ ID NO: 4434 - protein, 7 aa, Homo sapiens
ALLLPYL

SEQ ID NO: 4435 - protein, 165 aa, Homo sapiens
MAGVGAGPLRAMGRQALLLLALCATGAQGLYFHIGETEKRCFIEEIPDETMVIGNYRTQMWDKQKEVFLPSTPGLGMHVEVKDPDGKVVLSRQYGSEGRFTFTSHTPGDHQICLHSNSTRMALFAGGKLRVHLDIQVGEHANNYPEIAAKDKLTELQLRARQLLD

SEQ ID NO: 4436 - protein, 290 aa, Homo sapiens
  SITE (4): Xaa equals any amino acid
ETTXQIDDSFSTKSCRVSGGSWVVYDGENFTGNQYVLEEGHYPCLSAMGCPPGATFKSLRFIDVEFSEPTIILFEREDFKGKKIELNAETVNLRSLGFNTQIRSVQVIGGIWVTYEYGSYRGRQFLLSPAEVPNWYEFSGCRQIGSLRPFVQERIYFRLRNKATGLFMSTNGNLEDLKLLRIQVMEDVGADDQIWIYQEGCIKCRIAEDCCLTIVGSLVTSGSKLGLALDQNADSQFWSLKSDGRIYSKLKPNLVLDIKGGTQYDQNHIILNTVSKEKFTQVWEAMVLYT

SEQ ID NO: 4437 - protein, 57 aa, Homo sapiens
MAGVGAGPLRAMGRQALLLLALCATGAQGLYFHIGETEKRCFIEEIPDETMVIGQAG

SEQ ID NO: 4438 - protein, 3 aa, Homo sapiens
SWL

SEQ ID NO: 4439 - protein, 616 aa, Homo sapiens; identical to SEQ ID NO: 3141

SEQ ID NO: 4440 - protein, 27 aa, Homo sapiens
AFPVCVHCNHFWERAKHVRPGDTLLSC

SEQ ID NO: 4441 - protein, 155 aa, Homo sapiens
  SITE (5): Xaa equals any amino acid
IRHEXEVGNKCPYSPELRVQQMVSMGIGNKPFLDIKALGERTLSALLTGRAARTRASVAVSSFEHAGPSLPGLSPGACSLPARVEEEAWDLDVKQISLAPETLDSSGDVSPGPRNSPSLQPPHPGSSTPTLASRGILGLSRQSHARALSDPTTPL

SEQ ID NO: 4442 - protein, 323 aa, Homo sapiens
  SITE (304): Xaa equals any amino acid
MGLSNILFVMAFLLSGAAPLKIQAYFNETADLPCQFANSQNQSLSELVVFWQDQENLVLNEVYLGKEKFDSVHSKYMGRTSFDSDSWTLRLHNLQIKDKGLYQCIIHHKKPTGMIRIHQMNSELSVLANFSQPEIVPISNITENVYINLTCSSIHGYPEPKKMSVLLRTKNSTIEYDGIMQKSQDNVTELYDVSISLSVSFPDVTSNMTIFCILETDKTRLLSSPFSIELEDPQPPPDHIPWITAVLPTVIICVMVFCLILWKWKKKKRPRNSYKCGTNTMEREESEQTKKREKIHIPERSDEXQRVFKSSKTSSCDKSDTCF

SEQ ID NO: 4443 - protein, 39 aa, Homo sapiens
MLVPAHNSLSTEAHLFSLFVLLCFLFLKFPPVIPVHLKS

SEQ ID NO: 4444 - protein, 46 aa, Homo sapiens
LNWNGNLIISVVFFCKIVNWYLGDFCSLLKKIAFVLKLYHLCSELK

SEQ ID NO: 4445 - protein, 2 aa, Homo sapiens
SA

SEQ ID NO: 4446 - protein, 30 aa, Homo sapiens; identical to SEQ ID NO: 3146

SEQ ID NO: 4447 - protein, 285 aa, Homo sapiens; identical to SEQ ID NO: 3148

SEQ ID NO: 4448 - protein, 285 aa, Homo sapiens; identical to SEQ ID NO: 3148

SEQ ID NO: 4449 - protein, 251 aa, Homo sapiens
  SITE (50): Xaa equals any amino acid
  SITE (127): Xaa equals any amino acid
  SITE (236): Xaa equals any amino acid
MTNLAVADLCLLCTLPFVLHSLRDTSDTPLCQLSQGIYLTNRYMSISLVXAIAVDRYVAVRHPLRARGLRSPRQAAAVCAVLWVLVIGSLVARWLLGIQEGGFCFRSTRHNFNSMAFPLLGFYLPLXVVVFCSLKVVTALAQRPPTDVGQAEATRKAARMVWANLLVFVVCFLPLHVGLTVRLAVGWNACALLETIRRALYITSKLSDANCCLDAICYYYMAKEFQEASALAVAPXAKAHKSQDSLCVTLA

SEQ ID NO: 4450 - protein, 27 aa, Homo sapiens
  SITE (23): Xaa equals any amino acid
LLCTCLLLHPARHSDSVCQSPGXTDNS

SEQ ID NO: 4451 - protein, 56 aa, Homo sapiens
EHEGNSNTGRTESMKCATHMDNQHEQNIAAALFKFCFNLNRQYTYMLLLKKKKKGG

SEQ ID NO: 4452 - protein, 79 aa, Homo sapiens
FHEASWGKSRLFVLFLPSLCACLLSTLIRGSDPLEKGRKSRGAGTGTPFYAVGFPLNPNSLGACGWDSHSLPLKKQWIN

SEQ ID NO: 4453 - protein, 58 aa, Homo sapiens
AGERCSSCKGPIDASEAVNLLFDLHGDYLVYSRCDNSSSCIFMICSPFSVCIIFEFLK

SEQ ID NO: 4454 - protein, 25 aa, Homo sapiens
  SITE (23): Xaa equals any amino acid
MLLVLPDTLLLSLVGPPPAHPQXCS

SEQ ID NO: 4455 - protein, 146 aa, Homo sapiens
VLAVLVLPCWWPAGPGAGERNRWDEGDRACSCPEAQPCPSCHVLSTCMPLPDALLHSLVCPWGSWKASFFLPSTLTAPSPCGWTWASIQAYAWQAARGKCLLQRSSRTHVCRNGGCGTHRTRMEACDARWLLWLRGPAGHVSSVPF

SEQ ID NO: 4456 - protein, 188 aa, Homo sapiens
MELRPWLLWVVAATGTLVLLAADAQGQKVFTNTWAVRIPGGPAVANSVARKHGFLNLGQIFGDYYHFWHRGVTKRSLSPHRPRHSRLQREPQVQWLEQQVAKRRTKRDVYQEPTDPKFPQQWYLSGVTQRDLNVKAAWAQGYTGHGIVVSILDDGIEKNHPDLAGNYDPGASFDVNDQDPDPSLGTHR

SEQ ID NO: 4457 - protein, 272 aa, Homo sapiens
MDSYLLMWGLLTFIMVPGCQAELCDDDPPEIPHATFKAMAYKEGTMLNCECKRGFRRIKSGSLYMLCTGNSSHSSWDNQCQCTSSATRNTTKQVTPQPEEQKERKTTEMQSPMQPVDQASLPGHCREPPPWENEATERIYHFVVGQMVYYQCVQGYRALHRGPAESVCKMTHGKTRWTQPQLICTGEMETSQFPGEEKPQASPEGRPESETSCLVTTTDFQIQTEMAATMETSIFTTEYQVAVAGCVFLLISVLLLSGLTWQRRQRKSRRTI

SEQ ID NO: 4458 - protein, 155 aa, Homo sapiens [sequence omitted]

SEQ ID NO: 4459 - protein, 161 aa, Homo sapiens
  SITE (156): Xaa equals any amino acid
  SITE (157): Xaa equals any amino acid
MSARLPVLSPPRWPRLLLLSLLLLGAVPGPRRSGAFYLPGLAPVNFCDEEKKSDECKAEIELFVNRLDSVESVLPYEYTAFDFCQASEGKRPSENLGQVLFGERIEPSPYKFTFNKKETCKLVCTKTYHTEKAEDKQKLEFLKKSMLLNYQHHWIXXYPYR

SEQ ID NO: 4460 - protein, 610 aa, Homo sapiens
  SITE (199): Xaa equals any amino acid
MSARLPVLSPPRWPRLLLLSLLLLGAVPGPRRSGAFYLPGLAPVNFCDEEKKSDECKAEIELFVNRLDSVESVLPYEYTAFDFCQASEGKRPSENLGQVLFGERIEPSPYKFTFNKKETCKLVCTKTYHTEKAEDKQKLEFLKKSMLLNYQHHWIVDNMPVTWCYDVEDGQRFCNPGFPIGCYITDKGHAKDACVISSXFHERDTFYIFNHVDIKIYYHVVETGSMGARLVAAKLEPKSFKHTHIDKPDCSGPPMDISNKASGEIKIAYTYSVSFEEDDKIRWASRWDYILESMPHTHIQWFSIMNSLVIVLFLSGMVAMIMLRTLHKDIARYNQMDSTEDAQEEFGWKLVHGDIFRPPRKGMLLSVFLGSGTQILIMTFVTLFFACLGFLSPANRGALMTCAVVLWVLLGTPAGYVAARFYKSFGGEKWKTNVLLTSFLCPGIVFADFFIMNLILWGEGSSAAIPFGTLVAILALWFCISVPLTFIGAYFGFKKNAIEHPVRTNQIPRQIPEQSFYTKPLPGIIMGGILPFGCIFIQLFFILNSIWSHQMYYMFGFLFLVFIILVITCSEATILLCYFHLCAEDYHWQWRSFLTRGFTAVYFLSMQYTT

SEQ ID NO: 4461 - protein, 400 aa, Homo sapiens
MLLLVTSLLLCELPHPAFLLIPEKSDLRTVAPASSLNVRFDSRTMNLSWDCQENTTFSKCFLTDKKNRVVEPRLSNNECSCTFREICLHEGVTFEVHVNTSQRGFQQKLLYPNSGREGTAAQNFSCFIYNADLMNCTWARGPTAPRDVQYFLYIRNSKRRREIRCPYYIQDSGTHVGCHLDNLSGLTSRNYFLVNGTSREIGIQFFDSLLDTKKIERFNPPSNVTVRCNTTHCLVRWKQPRTYQKLSYLDFQYQLDVHRKNTQPGTENLLINVSGDLENRYNFPSSEPRAKHSVKIRAADVRILNWSSWSEAIEFGSDDGNLGSVYIYVLLIVGTLVCGIVLGFLFKRFLRIQRLFPPVPQIKDKLNDNHEVEDEIIWEEFTPEEGKGYREEVLTVKEIT

SEQ ID NO: 4462 - protein, 34 aa, Homo sapiens
  SITE (8): Xaa equals any amino acid
  SITE (12): Xaa equals any amino acid
MITMRWKXLIIXEEFTPEEGKGYREEVLTVKEIT

SEQ ID NO: 4463 - protein, 97 aa, Homo sapiens
MLLLVTSLLLCELPHPAFLLIPEKSDLRTVAPASSLNVRFDSRTMNLSWDCQENTTFSKCFLTDKKNRVVEPRLSNNECSCTFREICLHEGVTFEVT

SEQ ID NO: 4464 - protein, 178 aa, Homo sapiens; identical to SEQ ID NO: 3606
  SITE (175): Xaa equals any amino acid

SEQ ID NO: 4465 - protein, 151 aa, Homo sapiens
MRFLAATFLLLALSTAAQAEPVQFKDCGSVDGVIKEVNVSPCPTQPCQLSKGQSYSVNVTFTSNIQSKSSKAVVHGILMGVPVPFPIPEPDGCKSGINCPIQKDKTYSYLNKLPVKSEYPSIKLVVEWQLQDDKNQSLFCWEIPVQIVSHL

SEQ ID NO: 4466 - protein, 89 aa, Homo sapiens; identical to SEQ ID NO: 2964

SEQ ID NO: 4467 - protein, 285 aa, Homo sapiens
VDPRVRTTQTPCPLAWERGSRSEDISVPGQKPPTCSSFSGMDVGPSSLPHLGLKLLLLLLLLPLRGQANTGCYGIPGMPGLPGAPGKDGYDGLPGPKGEPGIPAIPGIRGPKGQKGEPGLPGHPGKNGPMGPPGMPGVPGPMGIPGEPGEEGRYKQKFQSVFTVTRQTHQPPAPNSLIRFNAVLTNPQGDYDTSTGKFTCKVPGLYYFVYHASHTANLCVLLYRSGVKVVTFCGHTSKTNQVNSGGVLLRLQVGEEVWLAVNDYYDMVGIQGSDSVFSGFLLFPD

SEQ ID NO: 4468 - protein, 193 aa, Homo sapiens
SCCCSCCCCPSGAKPTQAATGSQGCPACPGHQGRMGTTDCRGPRGSQESQPFPGSEDPKGRYKQKFQSVFTVTRQTHQPPAPNSLIRFNAVLTNPQGDYDTSTGKFTCKVPGLYYFVYHASHTANLCVLLYRSGVKVVTFCGHTSKTNQVNSGGVLLRLQVGEEVWLAVNDYYDMVGIQGSDSVFSGFLLFPD

SEQ ID NO: 4469 - protein, 145 aa, Homo sapiens
MRAAGTLLAFCCLVLSTTGGPSPDTCSQDLNSRVKPGFPKTIKTNDPGVLQAARYSVEKFNNCTNDMFLFKESRITRALVQIVKGLKYMLEVEIGRTTCKKNQHLRLDDCDFQTNHTLKQTLSCYSEVWVVPWLQHFEVPVLRCH

SEQ ID NO: 4470 - protein, 475 aa, Homo sapiens
  SITE (328): Xaa equals any amino acid
  SITE (373): Xaa equals any amino acid
  SITE (431): Xaa equals any amino acid
  SITE (447): Xaa equals any amino acid
  SITE (462): Xaa equals any amino acid
  SITE (467): Xaa equals any amino acid
  SITE (472): Xaa equals any amino acid
  SITE (473): Xaa equals any amino acid
  SITE (474): Xaa equals any amino acid
  SITE (475): Xaa equals any amino acid
TLRMARARGSPCPPLPPGRMSWPHGALLFLWLFSPPLGAGGGGVAVTSAAGGGSPPATSCPVACSCSNQASRVICTRRDLAEVPASIPVNTRYLNLQENGIQVIRTDTFKHLRHLEILQLSKNLVRKIEVGAFNGLPSLNTLELFDNRLTTVPTQAFEYLSKLRELWLRNNPIESIPSYAFNRVPSLRRLDLGELKRLEYISEAAFEGLVNLRYLNLGMCNLKDIPNLTALVRLEELELSGNRLDLIRPGSFQGLTSLRKLWLMHAQVATIERNAFDDLKSLEELNLSHNNLMSLPHDLFTPLHRLERVHLNHNPWHCNCDVLWLSWXLKETVPSNTTCCARCHAPAGLKGRYIGELDQSHFTCYAPVIVEPXTDLNVTEGMAAELKCRTGTSMTSVNWLTPNGTLMTHGSYRVRISVLHDGTLNFTNVTXQDTGQYTCMVTNSAGXTTLGHAQVSAGTRAXGAPAXRGGRXXXX

SEQ ID NO: 4471 - protein, 14 aa, Homo sapiens
RGRGAATSGCCGTG

SEQ ID NO: 4472 - protein, 145 aa, Homo sapiens; identical to SEQ ID NO: 4469

SEQ ID NO: 4473 - protein, 6 aa, Homo sapiens
SVIFFL

SEQ ID NO: 4474 - protein, 6 aa, Homo sapiens
SVIFFL

SEQ ID NO: 4475 - protein, 110 aa, Homo sapiens
MALYADVSGKQFPVTRGQDVGRYQVSWSVDHKSARAGTYEVRFFDEESYSLLRKAQRNNEDISVIPPLFTVSVDHRGTWNGPWVSTEVLAAAIGLVIYYLAFSAKSHIQA

SEQ ID NO: 4476 - protein, 181 aa, Homo sapiens
MLVDGPSERPALCFLLLAVAMSFFGSALSIDETRAHLLLKEKMMRLGGRLVLNTKEELANERLMTLKIAEMKEAMRTLIFPPSMHFFQAKHLIERSQVFNILRMMPKGAALHLHDIGIVTMDWLVRNVTYRPHCHICFTPRGIMQFRFAHPTPRPSEKCSKWILLEDYRKRVQNVTEFDDR

SEQ ID NO: 4477 - protein, 11 aa, Homo sapiens
  SITE (11): Xaa equals any amino acid
PFLCFFIPFIX

SEQ ID NO: 4478 - protein, 39 aa, Homo sapiens
QTPAVALYLHAVAKSKLPYSCLSYDNSLLTDLPFLPFAS

SEQ ID NO: 4479 - protein, 22 aa, Homo sapiens
RPWICFEQTPRSRTYSWKKDIP

SEQ ID NO: 4480 - protein, 245 aa, Homo sapiens; identical to SEQ ID NO: 3165

SEQ ID NO: 4481 - protein, 245 aa, Homo sapiens; identical to SEQ ID NO: 3165

SEQ ID NO: 4482 - protein, 62 aa, Homo sapiens
  SITE (49): Xaa equals any amino acid
  SITE (61): Xaa equals any amino acid
PHLALQGCPWGRAPLASQGVPWGHFSQDGRVSRVLPSALWVLGSREEGXRAFALHPPSRNXN

SEQ ID NO: 4483 - protein, 398 aa, Homo sapiens
  SITE (94): Xaa equals any amino acid
  SITE (150): Xaa equals any amino acid
MEGAALLRVSVLCIWMSALFLGVGVRAEEAGARVQQNVPSGTDTGDPQSKPLGDWAAGTMDPESSIFIEDAIKYFKEKVSTQNLLLLLTDNEAXNGFVAAAELPRNEADELRKALDNLARQMIMKDKNWHDKGQQYRNWFLKEFPRLKSXLEDNIRRLRALADGVQKVHKGTTIANVVSGSLSISSGILTLVGMGLAPFTEGGSLVLLEPGMELGITAALTGITSSTIDYGKKWWTQAQAHDLVIKSLDKLKEVKEFLGENISNFLSLAGNTYQLTRGIGKDIRALRRARANLQSVPHASASRPRVTEPISAESGEQVERVNEPSILEMSRGVKLTDVAPVSFFLVLDVVYLVYESKHLHEGAKSETAEELKKVAQELEEKLNILNNNYKILQADQEL

SEQ ID NO: 4484 - protein, 10 aa, Homo sapiens
GAYLSQAAAS

SEQ ID NO: 4485 - protein, 219 aa, Homo sapiens; identical to SEQ ID NO: 3172

SEQ ID NO: 4486 - protein, 472 aa, Homo sapiens
MIRTRRGWSSMWPWIGVGYLAGCLVHALGEKQPELQISERDVLCVQIAGLCHDLGHGPFSHMFDGRFIPLARPEVKWTHEQGSVMMFEHLINSNGIKPVMEQYGLIPEEDICFIKEQIVGPLESPVEDSLWPYKGRPENKSFLYEIVSNKRNGIDVDKWDYFARDCHHLGIQNNFDYKRFIKFARVCEVDNELRICARDKEVGNLYDMFHTRNSLHRRAYQHKVGNIIDTMITDAFLKADDYIEITGAGGKKYRISTAIDDMEAYTKLTDNIFLEILYSTDPKLKDAREILKQIEYRNLFKYVGETQPTGQIKIKREDYESLPKEVASAKPKVLLDVKLKAEDFIVDVINMDYGMQEKNPIDHVSFYCKTAPNRAIRITKNQVSQLLPEKFAEQLIRVYCKKVDRKSLYAARQYFVQWCADRNFTKPQDGDVIAPLITPQKKEWNDSTSVQNPTRLREASKSRVQLFKDDPM

SEQ ID NO: 4487 - protein, 472 aa, Homo sapiens
  SITE (244): Xaa equals any amino acid
MIRTRRGWSSMWPWIGVGYLAGCLVHALGEKQPELQISERDVLCVQIAGLCHDLGHGPFSHMFDGRFIPLARPEVKWTHEQGSVMMFEHLINSNGIKPVMEQYGLIPEEDICFIKEQIVGPLESPVEDSLWPYKGRPENKSFLYEIVSNKRNGIDVDKWDYFARDCHHLGIQNNFDYKRFIKFARVCEVDNELRICARDKEVGNLYDMFHTRNSLHRRAYQHKVGNIIDTMITDAFLKADDYIXITGAGGKKYRISTAIDDMEAYTKLTDNIFLEILYSTDPKLKDAREILKQIEYRNLFKYVGETQPTGQIKIKREDYESLPKEVASAKPKVLLDVKLKAEDFIVDVINMDYGMQEKNPIDHVSFYCKTAPNRAIRITKNQVSQLLPEKFAEQLIRVYCKKVDRKSLYAARQYFVQWCADRNFTKPQDGDVIAPLITPQKKEWNDSTSVQNPTRLREASKSRVQLFKDDPM

SEQ ID NO: 4488 - protein, 424 aa, Homo sapiens
FWGAERAARASRQTAARAPSPRRRPPPPPRTSSCPRVPGPRRPKSAVHSMSASAPAAEGEGTPTQPASEKEPEMPGPREESEEEEDEDDEEEEEEEKEKSLIVEGKREKKKVERLTMQVSSLQREPFTIAQGKGQKLCEIERIHFFLSKKKTDELRNLHKLLYNRPGTVSSLKKNVGQFSGFPFEKGSVQYKKKEEMLKKFRNAMLKSICEVLDLERSGVNSELVKRILNFLMHPKPSGKPLPKSKKTCSKGSKKERNSSGMARKAKRTKCPEILSDESSSDEDEKKNKEESSDDEDKESEEEPPKKTAKREKPKQKATSKSKKSVKSANVKKADSSTTKKNQNSSKKESESEDSSDDEPLIKKLKKPPTDEELKETIKKLLASANLEEVTMKQICKKVYENYPTYDLTERKDFIKTTVKELIS

SEQ ID NO: 4489 - protein, 14 aa, Homo sapiens
FQTLSLKTLRMFAC

SEQ ID NO: 4490 - protein, 140 aa, Homo sapiens
MVRLPLQCVLWGCLLTAVHPEPPTACREKQYLINSQCCSLCQPGQKLVSDCTEFTETECLPCGESEFLDTWNRETHCHQHKYCDPNLGLRVQQKGTSETDTICTCEEGWHCTSEACESCVLHRSCSPGFGVKQIGPQDRA

SEQ ID NO: 4491 - protein, 49 aa, Homo sapiens; identical to SEQ ID NO: 3178

SEQ ID NO: 4492 - protein, 62 aa, Homo sapiens
CPQLSFCSTTSLATPMAEVPAWPACEKVPFRHRTPVKWLPHPLAPVSKTFLKGKEAGDSEGT

SEQ ID NO: 4493 - protein, 64 aa, Homo sapiens
CPQLSFCSTTSLATPMAEVPAWPACEKVPFRHRTPVKWLPHPLAPVSKTFLKGKEAGDSGRNIR

SEQ ID NO: 4494 - protein, 314 aa, Homo sapiens
MVKLLVAKILCMVGVFFFMLLGSLLPVKIIETDFEKAHRSKKILSLCNTFGGGVFLATCFNALLPAVREKLQKVLSLGHISTDYPLAETILLLGFFMTVFLEQLILTFRKEKPSFIDLETFNAGSDVGSDSEYESPFMGGARGHALYVEPHGHGPSLSVQGLSRASPVRLLSLAFALSAHSVFEGLALGLQEEGEKVVSLFVGVAVHETLVAVALGISMARSAMPLRDAAKLAVTVSAMIPLGIGLGLGIESAQGVPGSVASVLLQGLAGGTFLFITFLEILAKELEEKSDRLLKVLFLVLGYTVLAGMVFLKW

SEQ ID NO: 4495 - protein, 314 aa, Homo sapiens; identical to SEQ ID NO: 4494

SEQ ID NO: 4496 - protein, 245 aa, Homo sapiens; identical to SEQ ID NO: 3165

SEQ ID NO: 4497 - protein, 122 aa, Homo sapiens
MDVGPSSLPHLGLKLLLLLLLLPLRGQANTGCYGIPGEPGEEGRYKQKFQSVFTVTRQTHQPPAPNSLIRFNAVLTNPQGDYDTSTGKFTCKVPGLYYFVYHASHTANLCVLLYRSGVKVVT

SEQ ID NO: 4498 - protein, 139 aa, Homo sapiens
MDVGPSSLPHLGLKLLLLLLLLPLRGQANTGCYGIPGEPGEEGRYKQKFQSVFTVTRQTHQPPAPNSLIRFNAVLTNPQEIMTRALASSPAKSPASTTLSTTRRIQPTCACCCTAAASKWSPSVATRPKPIRSTRAVCC

SEQ ID NO: 4499 - protein, 383 aa, Homo sapiens
  SITE (252): Xaa equals any amino acid
  SITE (340): Xaa equals any amino acid
MGSGILGLAYVMANTGVFGFSFLLLTVALLASYSVHLLLSMCIQTAVTSYEDLGLFAFGLPGKLVVAGTIIIQNIGAMSSYLLIIKTELPAAIAEFLTGDYSRYWYLDGQTLLIIICVGIVFPLALLPKIGFLGYTSSLSFFFMMFFALVVIIKKWSIPCPLTLNYVEKGFQSAYALPTMAFSFLCHTSILPIYCELQSPSKKRMQNVTNTAIALSFLIYFISALFGYLTFYDKVESELLKGYSKYLSHDVXVMTVKLCILFAVLLTVPLIHFPARKAVTMMFFSNFPFSWIRHFLITLALNIIIVLLAIYVPDIRNVFGVVGASTSTCLIFIFPGLFYXKLSREDFLSWKKLGVGVQWCDLSSLQPLPPGLKQSSHLSLQSS

SEQ ID NO: 4500 - protein, 61 aa, Homo sapiens [sequence omitted]

SEQ ID NO: 4501 - protein, 279 aa, Homo sapiens
MQGWRRGREGERINSSVASLAPLCILPDLPSNMHLARLVGSCSLLLLLGALSGWAASDDPIEKVIEGINRGLSNAEREVGKALDGINSGITHAGREVEKVFNGLSNMGSHTGKELDKGVQGLNHGMDKVAHEINHGIGQAGKEAEKLGHGVNNAAGQAGKEADKAVQGFHTGVHQAGKEAEKLGQGVNHAADQAGKEVEKLGQGAHHAAGQAGKELQNAHNGVNQASKEANQLLNGNHQSGSSSHQGGATTTPLASGASVNTPFINLPALWRSVANIMP

SEQ ID NO: 4502 - protein, 447 aa, Homo sapiens
  SITE (346): Xaa equals any amino acid
  SITE (367): Xaa equals any amino acid
  SITE (440): Xaa equals any amino acid
  SITE (443): Xaa equals any amino acid
  SITE (447): Xaa equals any amino acid
MGAARSPPSAVPGPLLGLLLLLLGVLAPGGASLRLLDHRALVCSQPGLNCTVKNSTCLDDSWIHPRNLTPSSPKDLQIQLHFAHTQQGDLFPVAHIEWTLQTDASILYLEGAELSVLQLNTNERLCVRFEFLSKLRHHHRRWRFTFSHFVVDPDQEYEVTVHHLPKPIPDGDPNHQSKNFLVPDCEHARMKVTTPCMSSGSLWDPNITVETLEAHQLRVSFTLWNESTHYQILLTSFPHMENHSCFEHMHHIPAPRPEEFHQRSNVTLTLRNLKGCCRHQVQIQPFFSSCLNDCLRHSATVSCPEMPDTPEPIPDYMPLWVYWFITGISILLVGSVILLIVCMTWXLAGPGSEKYSDDTKYTDGLPXADLIPPPLKPRKVWIIYSADHPLYVDVVLKFAQFLLTACGTEVALDLLEEQAISEAGVMTWVGRQKQEMVESXSKXSVFX

SEQ ID NO: 4503 - protein, 67 aa, Homo sapiens
  SITE (19): Xaa equals any amino acid
PSPLPDPSTGSTLSPCPFXLMKAGSHPGGPVLPVGGTCSLLSHGLKCARKPGPAHLPLESFPGGITP

SEQ ID NO: 4504 - protein, 7 aa, Homo sapiens
  SITE (4): Xaa equals any amino acid
GRAXCAP

SEQ ID NO: 4505 - protein, 136 aa, Homo sapiens
  SITE (22): Xaa equals any amino acid
  SITE (25): Xaa equals any amino acid
ALADPGAAGEVPALPLLLLLPXRPXGLWPGRPGSQARAPGAPASRCRFPEAAVAPQTPLRPGTGHPGHLLSRGSHIRTSRDSGPASPGTCPGRRGAACRPGSAGSCPPTAPLRGACGPAGTSPGPGCGSTPPRTCP

SEQ ID NO: 4506 - protein, 10 aa, Homo sapiens
AMPSPHLGLA

SEQ ID NO: 4507 - protein, 245 aa, Homo sapiens; identical to SEQ ID NO: 3165

SEQ ID NO: 4508 - protein, 106 aa, Homo sapiens
  SITE (64): Xaa equals any amino acid
  SITE (85): Xaa equals any amino acid
  SITE (92): Xaa equals any amino acid
MDVGPSSLPHLGLKLLLLLLLLPLRGQANTGCYGIPGMPGCPGHQGRMGTTDCRGPRGSQESQXFPGSEDPKAEGRTGYPASWEXAHGTLDXKVPAHGSLRPVRGI

SEQ ID NO: 4509 - protein, 245 aa, Homo sapiens; identical to SEQ ID NO: 3165

SEQ ID NO: 4510 - protein, 21 aa, Homo sapiens
ATVPSLGLYVLCEVHMSLSNV

SEQ ID NO: 4511 - protein, 245 aa, Homo sapiens; identical to SEQ ID NO: 3165

SEQ ID NO: 4512 - protein, 149 aa, Homo sapiens
  SITE (72): Xaa equals any amino acid
  SITE (85): Xaa equals any amino acid
  SITE (102): Xaa equals any amino acid
  SITE (104): Xaa equals any amino acid
  SITE (117): Xaa equals any amino acid
  SITE (147): Xaa equals any amino acid
MDVGPSSLPHLGLKLLLLLLLLPLRGQANTGCYGIPGMPGLPGAPGKDGYDGLPGPKGEPGIQPFRDPRTQXAEGRTRLPGIWEXCPWDPLGCQGCRPMGIXGXQVRRADTSRNSSXCHGTRRPQPLTQQLIDQRGLTTEGDIHDTXSH

SEQ ID NO: 4513 - protein, 2 aa, Homo sapiens
VS

SEQ ID NO: 4514 - protein, 245 aa, Homo sapiens; identical to SEQ ID NO: 3165

SEQ ID NO: 4515 - protein, 25 aa, Homo sapiens
  SITE (14): Xaa equals any amino acid
KSKKKKKGRPHKRXPRGAKETRACD

SEQ ID NO: 4516 - protein, 464 aa, Homo sapiens [sequence omitted]

SEQ ID NO: 4517 - protein, 17 aa, Homo sapiens
VFGQLINLILLCKKKKK

SEQ ID NO: 4518 - protein, 476 aa, Homo sapiens
  SITE (25): Xaa equals any amino acid
  SITE (435): Xaa equals any amino acid
MVGAMWKVIVSLVLLMPGPCDGLFXSLYRSVSMPPKGDSGQPLFLTPYIEAGKIQKGRELSLVGPFPGLNMKSYAGFLTVNKTYNSNLFFWFFPAQIQPEDAPVVLWLQGGPGGSSMFGLFVEHGPYVVTSNMTLRDRDFPWTTTLSMLYIDNPVGTGFSFTDDTHGYAVNEDDVARDLYSALIQFFQIFPEYKNNDFYVTGESYAGKYVPAIAHLIHSLNPVREVKINLNGIAIGDGYSDPESIIGGYAEFLYQIGLLDEKQKKYFQKQCHECIEHIRKQNWFEAFEILDKLLDGDLTSDPSYFQNVTGCSNYYNFLRCTEPEDQLYYVKFLSLPEVRQAIHVGNQTFNDGTIVEKYLREDTVQSVKPWLTEIMNNYKVLIYNGQLDIIVAAALTERSLMGMDWKGSQEYKKAEKKVWKIFKSDSEVAGYIRQXGDFHQVIIRGGGHILPYDQPLRAFDMINRFIYGKGWDPYVG

SEQ ID NO: 4519 - protein, 7 aa, Homo sapiens
SPFRQLA

SEQ ID NO: 4520 - protein, 32 aa, Homo sapiens; identical to SEQ ID NO: 3197

SEQ ID NO: 4521 - protein, 263 aa, Homo sapiens
  SITE (20): Xaa equals any amino acid
REQKLELHRGGGRSRTSGSXGLQEFGTSKAEEKALKRVRRKIKNKISAQESRRKKKEYVECLEKKVETFTSENNELWKKVETLENANRTLLQQLQKLQTLVTNKISRPYKMAATQTGTCLMVAALCFVLVLGSLVPCLPEFSSGSQTVKEDPLAADGVYTASQMPSRSLLFYDDGAGLWEDGRSTLLPMEPPDGWEINPGGPAEQRPRDHLQHDHLDSTHETTKYLSEAWPKDGGNGTSPDFSHSKEWFHDRDLGPNTTIKLS

SEQ ID NO: 4522 - protein, 32 aa, Homo sapiens; identical to SEQ ID NO: 3198

SEQ ID NO: 4523 - protein, 32 aa, Homo sapiens; identical to SEQ ID NO: 3198

SEQ ID NO: 4524 - protein, 160 aa, Homo sapiens; identical to SEQ ID NO: 3199

SEQ ID NO: 4525 - protein, 160 aa, Homo sapiens; identical to SEQ ID NO: 3199

SEQ ID NO: 4526 - protein, 107 aa, Homo sapiens
MKGKKGIVAASGSETEDEDSMDIPLDLSSSAGSGKRRRRGNLPKESVQILRDWLYEHRYNAYPSEQEKALLSQQTHLSTLQVCNWFINARRRLLPDMLRKDGKDPNQ

SEQ ID NO: 4527 - protein, 272 aa, Homo sapiens; identical to SEQ ID NO: 3200

SEQ ID NO: 4528 - protein, 262 aa, Homo sapiens
  SITE (208): Xaa equals any amino acid
MGPPGSPWQWVTLLLGLLLPPAAPFWLLNVLFPPHTTPKAELSNHTRPVILVPGCLGNQLEAKLDKPDVVNWMCYRKTEDFFTIWLDLNMFLPLGVDCWIDNTRVVYNRSSGLVSNAPGVQIRVPGFGKTYSVEYLDSSKLAGYLHTLVQNLVNNGYVRDETVRAAPYDWRLEPGQQEEYYRKLAGLVEEMHAAYGKPVFLIGHSLGXLHLLYFLLRHPRPGRTALLMASSLLGLPGVAPSSPCWSWPQVTTRASPSCPASS

SEQ ID NO: 4529 - protein, 120 aa, Homo sapiens
  SITE (21): Xaa equals any amino acid
  SITE (98): Xaa equals any amino acid
IIEQKSSFRVKSRSSRLKRVXRGPRRRWKKIFQGGRRVKWGSQEAAYATSYSMSAASYFLNLIFWWDSFRIGGGGGGGGGGGGGGGGGGGGGGGGGGXLISYPVSPCAGVETGPSQHASR

SEQ ID NO: 4530 - protein, 207 aa, Homo sapiens
  SITE (76): Xaa equals any amino acid
RRWGWSLSFRAASFRVEELEFCFGSLSLGSRKEGEAGFLIQCCPHPHPCAVEDAERPSLGPLWPPRHGSPSPLLSXPALPAVPEPYAGHCQRPLAGTPHHSCHVGPANRGEGARPGWGGTRQPPGSRSLPPAAREGPQVQCSPPEFLPLPWAVLSLQSGLRPEQWALSRWPCPGNKEPLAWALHANKCFFRKKKKKKKKKKKKKRAA

SEQ ID NO: 4531 - protein, 128 aa, Homo sapiens
  SITE (99): Xaa equals any amino acid
MGCAFINLCILASQHAWAQLTFWEASQLYLLFLSLTLATVNARWLEPRTTAAMWALQTVEKERGLGGEVPGSHQGPDPYRQLREKDPKYSALRQNFFRXHGLSSLCNLGCVLSNGLCLAGLALEIRSL

SEQ ID NO: 4532 - protein, 73 aa, Homo sapiens
MLQGPGSLLLLFLASHCCLGSARGLFLFGQPDFSYKRSNCKPIPVNLQLSHGIEYQNMRLPNLLGHETMKEHG

SEQ ID NO: 4533 - protein, 41 aa, Homo sapiens; identical to SEQ ID NO: 3210

SEQ ID NO: 4534 - protein, 12 aa, Homo sapiens
GRNSIQKCCLQL

SEQ ID NO: 4535 - protein, 388 aa, Homo sapiens
  SITE (3): Xaa equals any amino acid
  SITE (14): Xaa equals any amino acid
  SITE (27): Xaa equals any amino acid
  SITE (30): Xaa equals any amino acid
  SITE (32): Xaa equals any amino acid
KLXLTKGNKSWSSXAVAAALELVDPPXCRXSXRDQLLLALLKCTDTELQLRRDAIFCQALVAAVCTFSEQLLAALGYRYNNNGEYEESSRDASRKWLEQVAATGVLLHCQSLLSPATVKEERTMLEDIWVTLSELDNVTFSFKQLDENYVANTNVFYHIEGSRQALKVIFYLDSYHFSKLPSRLEGGASLRLHTALFTKVLENVEGLPSPGSQAAEDLQQDINAQSLEKVQQYYRKLRAFYLERSNLPTDASTTAVKIDQLIRPINALDELCRLMKSFVHPKPGAAGSVGAGLIPISSELCYRLGACQMVMCGTGMQRSTLSVSLEQAAILARSHGLLPKCIMQATDIMRKQGPRVEILAKNLRVKDQMPQGAPRLYRLCQPPVDGDL

SEQ ID NO: 4536 - protein, 199 aa, Homo sapiens
GERLGSPAQQMRRDLRLIEVTETICKRLLDYSLHKERTGSNRFAKGMSETFETLHNLVHKGVKVVMDIPYELWNETSAEVADLKKQCDVLVEEFEEVIEDWYRNHQEEDLTEFLCANHVLKGKDTSCLAEQWSGKKGDTAALGGKKSKKKSSRAKAAGGRSSSSKQRKELGGLEGDPSPEEDEGIQKASPLTHSPPDEL

SEQ ID NO: 4537 - protein, 49 aa, Homo sapiens; identical to SEQ ID NO: 3214

SEQ ID NO: 4538 - protein, 41 aa, Homo sapiens
MHERPGRFSALFWPPWSHGLGSAAPHLTIYFLLPCQPFFCV

SEQ ID NO: 4539 - protein, 255 aa, Homo sapiens
MLDFAIFAVTFLLALVGAVLYLYPASRQAAGIPGITPTEEKDGNLPDIVNSGSLHEFLVNLHERYGPVVSFWFGRRLVVSLGTVDVLKQHINPNKTLDPFETMLKSLLRYQSGGGSVSENHMRKKLYENGVTDSLKSNFALLLKLSEELLDKWLSYPETQHVPLSQHMLGFAMKSVTQMVMGSTFEDDQEVIRFQKNHGTVWSEIGKGFLDGSLDKNMTRKKQYEDALMQLESVLRNIIKERKGRTSVNIFSLTP

SEQ ID NO: 4540 - protein, 319 aa, Homo sapiens
MLDFAIFAVTFLLALVGAVLYLYPASRQAAGIPGITPTEEKDGNLPDIVNSGSLHEFLVNLHERYGPVVSFWFGRRLVVSLGTVDVLKQHINPNKTLDPFETMLKSLLRYQSGGGSVSENHMRKKLYENGVTDSLKSNFALLLKLSEELLDKWLSYPETQHVPLSQHMLGFAMKSVTQMVMGSTFEDDQEVIRFQKNHGTVWSEIGKGFLDGSLDKNMTRKKQYEDALMQLESVLRNIIKERKGRNFSQHIFIDSLVQGNLNDQQILEDSMIFSLASCIITAKLCTWAICFLTTSEEVQKKLYEEINQVFGNGPVLREN

SEQ ID NO: 4541 - protein, 462 aa, Homo sapiens [sequence omitted]

SEQ ID NO: 4542 - protein, 96 aa, Homo sapiens
  SITE (62): Xaa equals any amino acid
  SITE (72): Xaa equals any amino acid
  SITE (83): Xaa equals any amino acid
  SITE (86): Xaa equals any amino acid
DSVLKKKKKGGRSRGSKLTYACMRRHSSSIVSPKFNSLAVVLQRRDWENPGVTQLNRLAAHXPFASWRNSEXGPAPIGLSNKXAQXWNGEMGTPPL

SEQ ID NO: 4543 - protein, 267 aa, Homo sapiens
  SITE (245): Xaa equals any amino acid
HLTEADHEQGNRLANRPVRDSAIKVFRSGPVLGLPQPVMRLGVNHRFQSLMDGHAGGLHLGESCDPVPHVWENGRLIAHLKVKVDGLVREGGKLITEAKLINALDFSPVREAVVLLLRFSVDGVPLGVLYIAVNIVVASSDDLVIQGELHALLHLLVEALLGVVRQLEGELGPAGLLGPAQEQQQKQHGGGARDSAAHDALGPVSRAAARALRPRRAGATTTDRVLGGCKGINVAPAELLVPNSXSPGDPLVLERPPPRWSSSFCSL

SEQ ID NO: 4544 - protein, 54 aa, Homo sapiens; identical to SEQ ID NO: 3217

SEQ ID NO: 4545 - protein, 268 aa, Homo sapiens
  SITE (162): Xaa equals any amino acid
  SITE (228): Xaa equals any amino acid
NFTQETAMTMITPSSKLTLTKGNKSWSSTAVAAALELVDPPGHFTSVDAAHFDFCSDLFDTTNSMFRFLAVGRCNLHSTVIFDFDGGASFFGQSTDYRTAFTDNIFDLVRVDLDGMDTRCELRDIATRRVDRLFHYAQDMQTRTFSLVQRNLHDLFGDTFNXDIHLQCRDTVAGTCNFEVHIAQVIFVAQNVRQYNVVVAFFTRPIAIPATAALIGTPASISARDAPXTEAIEEEPLDSVISDTTRTVYGNLSISGMTASTPRFARRP

SEQ ID NO: 4546 - protein, 131 aa, Homo sapiens [sequence omitted]

SEQ ID NO: 4547 - protein, 389 aa, Homo sapiens
  SITE (111): Xaa equals any amino acid
  SITE (142): Xaa equals any amino acid
  SITE (143): Xaa equals any amino acid
  SITE (146): Xaa equals any amino acid
  SITE (162): Xaa equals any amino acid
PAHDRTCEPGSNGKSSGACGFMRYRVWIHEVANTKKETVFKWLKDDVLYETETLPNLERGICELLIPKLSKKDHGEYKATLKDDRGQDVSILEIAGKVYDDMILAMSRVCXKSASPLKVLCTPEGIRLQCFMKYFTDEMKVXXCHXDAKISSSEHMRIGGSXEMAWLQICEPTEKDKGKYTFEIFDGKDNHQRSLDLSGQAFDEAFAEFQQFKAAAFAEKNRGRLIGGLPDVVTIMEGKTLNLTCTVFGNPDPEVIWFKNDQDIQLSEHFSVKVEQAKYVSMTIKGVTSEDSGKYSINIKNKYGGEKIDVTVSVYKHGEKIPDMAPPSKPSPSSSPRLPQRQASEGVFLAWRWENMLGRDRNAVCLFQMSSWHPSGVLCGLIVDHTLCF

SEQ ID NO: 4548 - protein, 46 aa, Homo sapiens
TQCVEKTANLFGSTLTPSSVAMWGQGRILKYPHGLKWKSWDSGKLA

SEQ ID NO: 4549 - protein, 89 aa, Homo sapiens
MRNVNSLSAINPVSLLLMHRSRALKRAVFLLTLPFSCLPGLCLSHSPIQRQEVEKGWARWLKPVIPALWEDEVGGSPEVRSSRPTWPTW

SEQ ID NO: 4550 - protein, 130 aa, Homo sapiens [sequence omitted]

SEQ ID NO: 4551 - protein, 244 aa, Homo sapiens; identical to SEQ ID NO: 3223

SEQ ID NO: 4552 - protein, 87 aa, Homo sapiens
KTGTVKVTAVGWSEHPPKFTMWPRTLIAHCCFFNSHSKYEMRCYRKSLAILKATPLLSKENGPVLSQVHTGEVIALLSCKLCNAKFF

SEQ ID NO: 4553 - protein, 53 aa, Homo sapiens
MYVAIQAVLSLYASGRTTGIVMDSGDGVTHTVPIYEGYALPHAILRLDLAAGT

SEQ ID NO: 4554 - protein, 112 aa, Homo sapiens; identical to SEQ ID NO: 3224

SEQ ID NO: 4555 - protein, 112 aa, Homo sapiens; identical to SEQ ID NO: 3224

SEQ ID NO: 4556 - protein, 66 aa, Homo sapiens
  SITE (64): Xaa equals any amino acid
LFCLFFVLFLFLFLFLVVGRSGEIFCDCTHSCSIKNLKKLLKKEKKGKHFKKKKKKLEGGPGTXFA

SEQ ID NO: 4557 - protein, 40 aa, Homo sapiens
MCYQDETVWVAFLFVFCFVFVFVFVFSCRWQRGNFLRLYT

SEQ ID NO: 4558 - protein, 482 aa, Homo sapiens; identical to SEQ ID NO: 3175

SEQ ID NO: 4559 - protein, 121 aa, Homo sapiens
MNSEGYLYTSELFTPECKFKESVFENYYVTYSSMIYRQQQSGRGWYLGLNKEGEIMKGNHVKKNKPAAHFLPKPLKVAMYKEPSLHDLTEFSRSGSGTPTKSRSVSGVLNGGKSMSHNEST

SEQ ID NO: 4560 - protein, 94 aa, Homo sapiens [sequence omitted]

SEQ ID NO: 4561 - protein, 146 aa, Homo sapiens
MFLNTEIAFTNLYHMVILRLVLYPWNVIFWKDGLLHKWVIKSYSTSSTNDHRKLTKHELKNRLSVLQSEGPDAALTIVTVLDKVASIVDSVQASQKRIEERHREMENAIKSVQIDLLSFHSRIAIQGISLTNCLRKPEKLVLTLKM

SEQ ID NO: 4562 - protein, 380 aa, Homo sapiens
MGAAAAEAPLRLPAAPPLAFCCYTSVLLLFAFSLPGSRASNQPPGGGGGSGGDCPGGKGKSINCSELNVRESDVRVCDESSCKYGGVCKEDGDGLKCACQFQCHTNYIPVCGSNGDTYQNECFLRRAACKHQKEITVIARGPCYSDNGSGSGEGEEEGSGAEVHRKHSKCGPCKYKAECDEDAENVGCVCNIDCSGYSFNPVCASDGSSYNNPCFVREASCIKQEQIDIRHLGHCTDTDDTSLLGKKDDGLQYRPDVKDASDQREDVYIGNHMPCPENLNGYCIHGKCEFIYSTQKASCRCESGYTGQHCEKTDFSILYVVPSRQKLTHVLIAAIIGAVQIAIIVAIVMCITRKCPKNNRGRRQKQNLGHFTSDTSSRMV

SEQ ID NO: 4563 - protein, 181 aa, Homo sapiens
MESKEPQLKGIVTRLFSQQGYFLQMHPDGTIDGTKDENSDYTLFNLIPVGLRVVAIQGVKASLYVAMNGEGYLYSSDVFTPECKFKESVFENYYVIYSSTLYRQQESGRAWFLGLNKEGQIMKGNRVKKTKPSSHFVPKPIEVCMYREPSLHEIGEKQGRSRKSSGTPTMNGGKVVNQDST

SEQ ID NO: 4564 - protein, 91 aa, Homo sapiens [sequence omitted]

SEQ ID NO: 4565 - protein, 81 aa, Homo sapiens
  SITE (66): Xaa equals any amino acid
  SITE (74): Xaa equals any amino acid
  SITE (76): Xaa equals any amino acid
LLLYLYCPACIVPNMTPLKYIHFAEALGPHLKPCHWLPYFKVNIVSLTLHNHYSSIVDHILHQVSXFCYLEVSXNXMKEFP

SEQ ID NO: 4566 - protein, 13 aa, Homo sapiens
MLLIYVFLFCWSF

SEQ ID NO: 4567 - protein, 13 aa, Homo sapiens
MLLIYVFLFCWSF

SEQ ID NO: 4568 - protein, 121 aa, Homo sapiens; identical to SEQ ID NO: 4559

SEQ ID NO: 4569 - protein, 302 aa, Homo sapiens
QTSPVLLASLGVGLVTLLGLAVGSYLVRRSRRPQVTLLDPNEKYLLRLLDKTTVSHNTKRFRFALPTAHHTLGLPVGKHIYLSTRIDGSLVIRPYTPVTSDEDQGYVDLVIKVYLKGVHPKFPEGGKMSQYLDSLKVGDVVEFRGPSGLLTYTGKGHFNIQPNKKSPPEPRVAKKLGMIAGGTGITPMLQLIRAILKVPEDPTQCFLLFANQTEKDIILREDLEELQARYPNRFKLWFTLDHPPKDWAYSKGFVTADMIREHLPAPGDDVLVLLCGPPPMVQLACHPNLDKLGYSQKMRFTY

SEQ ID NO: 4570 - protein, 229 aa, Homo sapiens; identical to SEQ ID NO: 3231
  SITE (175): Xaa equals any amino acid

SEQ ID NO: 4571 - protein, 53 aa, Homo sapiens
  SITE (25): Xaa equals any amino acid
TLRQTLWSSPNILRYKVGNGIILMXKIKSSLSVPSNPADPVVLKCVTGIFCRI

SEQ ID NO: 4572 - protein, 11 aa, Homo sapiens
  SITE (6): Xaa equals any amino acid
IWYPIXIIKGT

SEQ ID NO: 4573 - protein, 206 aa, Homo sapiens; identical to SEQ ID NO: 3237

SEQ ID NO: 4574 - protein, 203 aa, Homo sapiens
  SITE (84): Xaa equals any amino acid
  SITE (167): Xaa equals any amino acid
MLPPAIHFYLLPLACILMKSCLAFKNDATEILYSHVVKPVPAHPSSNSTLNQARNGGRHFSNTGLDRNTRVQVGCRELRSTKYXSDGQCTSISPLKELVCAGECLPLPVLPNWIGGGYGTKYWSRRSSQEWRCVNDKTRTQRIQLQCQDGSTRTYKITVVTACKCKXYTRQHNESSHNFESMYLPSQSHHRERKRPQIQKTDE

SEQ ID NO: 4575 - protein, 158 aa, Homo sapiens
  SITE (2): Xaa equals any amino acid
MXAASAGATRLLLLLLMAVAAPSRARGSGCRAGTGARGAGAEGREGEACGTVGLLLEHSFEIDDSANFRKRGSLLWNQQDGTLSLSQRQLSEEERGRLRDVAASYLDCGATRACGPLLCATLPVSLFKNIDDTLKCVNVLKSYSFQQPKATVVLARRS

SEQ ID NO: 4576 - protein, 245 aa, Homo sapiens
  SITE (65): Xaa equals any amino acid
  SITE (94): Xaa equals any amino acid
MAAASAGATRLLLLLLMAVAAPSRARGSGCRAGTGARGAGAEGREGEACGTVGLLLEHSFEIDDXGQLPEAGLTALEPAGWYLVPVTAAAQRGXAGPTPGCGSPEWPVPGPDPKATRGPGWPGSWWLCLLLCPCVLPGGVAPVGPADPARGCGRQRGGRVGGDAPHGPMQPQGLPPCPWSRARDPGHYASSDLASPYPEPMQSGNMPPSLQPLCLCSRWSHPPVPGWARWSCPGSCSAPLTLTLD

SEQ ID NO: 4577 - protein, 262 aa, Homo sapiens
MAAASAGATRLLLLLLMAVAAPSRARGSGCRAGTGARGAGAEGREGEACGTVGLLLEHSFEIDDSANFRKRGSLLWNQQDGTLSLSQRQLSEEERGRLRDVAALNGLYRVRIPRRPGALDGLEAGGYVSSFVPACSLVESHLSDQLTLHVDVAGNVVGVSVVTHPGGCRGHEVEDVDLELFNTSVQLQPPTTAPGPETAAFIERLEMEQAQKAKNPQEQKSFFAKYWMYIIPVVLFLMMSGAPDTGGQGGGGGGGGGGGSGR

SEQ ID NO: 4578 - protein, 158 aa, Homo sapiens; identical to SEQ ID NO: 3238

SEQ ID NO: 4579 - protein, 158 aa, Homo sapiens; identical to SEQ ID NO: 3238

SEQ ID NO: 4580 - protein, 158 aa, Homo sapiens; identical to SEQ ID NO: 3238

SEQ ID NO: 4581 - protein, 214 aa, Homo sapiens; identical to SEQ ID NO: 3239

SEQ ID NO: 4582 - protein, 472 aa, Homo sapiens
  SITE (21): Xaa equals any amino acid
  SITE (431): Xaa equals any amino acid
MWKVIVSLVLLMPGPCDGLFXSLYRSVSMPPKGDSGQPLFLTPYIEAGKIQKGRELSLVGPFPGLNMKSYAGFLTVNKTYNSNLFFWFFPAQIQPEDAPVVLWLQGGPGGSSMFGLFVEHGPYVVTSNMTLRDRDFPWTTTLSMLYIDNPVGTGFSFTDDTHGYAVNEDDVARDLYSALIQFFQIFPEYKNNDFYVTGESYAGKYVPAIAHLIHSLNPVREVKINLNGIAIGDGYSDPESIIGGYAEFLYQIGLLDEKQKKYFQKQCHECIEHIRKQNWFEAFEILDKLLDGDLTSDPSYFQNVTGCSNYYNFLRCTEPEDQLYYVKFLSLPEVRQAIHVGNQTFNDGTIVEKYLREDTVQSVKPWLTEIMNNYKVLIYNGQLDIIVAAALTERSLMGMDWKGSQEYKKAEKKVWKIFKSDSEVAGYIRQXGDFHQVIIRGGGHILPYDQPLRAFDMINRFIYGKGWDPYVG

SEQ ID NO: 4583 - protein, 472 aa, Homo sapiens [sequence omitted]

SEQ ID NO: 4584 - protein, 175 aa, Homo sapiens; identical to SEQ ID NO: 3085

SEQ ID NO: 4585 - protein, 19 aa, Homo sapiens
CEEGEHLGDYHGAGMLRAL

SEQ ID NO: 4586 - protein, 94 aa, Homo sapiens
MGACSYRPSWWMCVFIMWSPCHLLPYDLGLMLWGAGGAADVVFTEQGFPVSHGEGLGPLVRHSCRGSVEGSFTCPCSKQKLSVVPFDSLTLPPA

SEQ ID NO: 4587 - protein, 37 aa, Homo sapiens
LGKESLGPGWWDLAPVREVEFLISQEAASQEYAWGGG

SEQ ID NO: 4588 - protein, 113 aa, Homo sapiens
MGEVLFAGGEGLPEEVPAGHSVPARRLLGGCAFLPPGHLPGFLSYEGPGTGLGGPLKPPSEESQEAAFPYSCRFLHMLAVSAGGATLQGQGSGGRGPGEQQQQEAGGQWHLVG

SEQ ID NO: 4589 - protein, 117 aa, Homo sapiens
  SITE (95): Xaa equals any amino acid
MRGPALAWEVHSNHQARKVRRLLFLIPAASCICSLSRPVGPPSRGRAAVAVAPESSSSRRPGDNGILWADWSFSPTLLLLFLPGSPEINVLGTWXSSLELGGYFKPNLPAVFVSIHV

SEQ ID NO: 4590 - protein, 170 aa, Homo sapiens; identical to SEQ ID NO: 3247

SEQ ID NO: 4591 - protein, 128 aa, Homo sapiens [sequence omitted]

SEQ ID NO: 4592 - protein, 128 aa, Homo sapiens [sequence omitted]

SEQ ID NO: 4593 - protein, 420 aa, Homo sapiens; identical to SEQ ID NO: 3249

SEQ ID NO: 4594 - protein, 124 aa, Homo sapiens
FIIWICHILFIHKLMEIWIVPLLGYECCYTKHLWTHFCVDICFYFSGLCTQEWNCCLNMATLFSFLRNCQTVYQSGCTIFCFVQQYIKGPISSHFGYHLLLHVFLMIVIVVSVNYFIMALIFLR

SEQ ID NO: 4595 - protein, 76 aa, Homo sapiens; identical to SEQ ID NO: 3253

SEQ ID NO: 4596 - protein, 150 aa, Homo sapiens
  SITE (68): Xaa equals any amino acid
  SITE (93): Xaa equals any amino acid
MLGTRAFSLWAVSLLPASPGFAPDPAVPKVRGNSEGHTEQVTLSISSLPSGQGLPSNPKSVFYLLREXSYLTAIDSSCESGDTILQWNHAVSXSGVNIEGLPHGEHQKIVATNRLTWGCAYSDSSPKTLSMKCFWSKKGRVFILLTKRFH

SEQ ID NO: 4597 - protein, 205 aa, Homo sapiens; identical to SEQ ID NO: 3255

SEQ ID NO: 4598 - protein, 93 aa, Homo sapiens; identical to SEQ ID NO: 3256

SEQ ID NO: 4599 - protein, 217 aa, Homo sapiens
  SITE (199): Xaa equals any amino acid
MRALEGPGLSLLCLVLALPALLPVPAVRGVAETPTYPWRDAETGERLVCAQCPPGTFVQRPCRRDSPTTCGPCPPRHYTQFWNYLERCRYCNVLCGEREEEARACHATHNRACRCRTGFFAHAGFCLEHASCPPGAGVIAPGTPSQNTQCQPCPPGTFSASSSSSEQCQPHRNCTALGLALNVPGSSSHDTLCTSCTGXPLSTRVPGAEECERAVID

SEQ ID NO: 4600 - protein, 170 aa, Homo sapiens [sequence omitted]

SEQ ID NO: 4601 - protein, 300 aa, Homo sapiens
MRALEGPGLSLLCLVLALPALLPVPAVRGVAETPTYPWRDAETGERLVCAQCPPGTFVQRPCRRDSPTTCGPCPPRHYTQFWNYLERCRYCNVLCGEREEEARACHATHNRACRCRTGFFAHAGFCLEHASCPPGAGVIAPGTPSQNTQCQPCPPGTFSASSSSSEQCQPHRNCTALGLALNVPGSSSHDTLCTSCTGFPLSTRVPGAEECERAVIDFVAFQDISIKRLQRLLQALEAPEGWGPTPRAGRAALQLKLRRRLTELLGAQDGALLVRLLQALRVARMPGLERSVRERFLPVH

SEQ ID NO: 4602 - protein, 129 aa, Homo sapiens; identical to SEQ ID NO: 4099

SEQ ID NO: 4603 - protein, 259 aa, Homo sapiens
  SITE (5): Xaa equals any amino acid
FVGAXLAVAGVLIQGIVRNPLASPDILGVNHAASLASVGALLLMPSLPVMVLPLLAFAGGMAGLILLKMLAKTHQPMKLALTGVALSACWASLTDYLMLSRPQDVNNALLWLTGSLWGRDWSFVKIAIPLMILFLPLSLSFCRDLDLLALGDARATTLGVSVPHTRFWALLLAVAMTSTGVAACGPISFIGLVVPHMMRSITGGRHRRLLPVSALTGALLLVVADLLARIIHPPLELPVGVLTAIIGAPWFVWLLVRMR

SEQ ID NO: 4604 - protein, 128 aa, Homo sapiens
  SITE (30): Xaa equals any amino acid
  SITE (50): Xaa equals any amino acid
  SITE (87): Xaa equals any amino acid
  SITE (126): Xaa equals any amino acid
MDYLLMIFSLLFVACQGAPETAVLGAELSXVGENGGEKPTPSPPWRLRGXKRCSCSSLMDKECVYFCHLGHHLGQHSRARCSVWTWXALGPREPWRIYFPQRQQTVRIDANVLAKKTRSAGIFCQXGK

SEQ ID NO: 4605 - protein, 450 aa, Homo sapiens
MLVTAYLAFVGLLASCLGLELSRCRAKPPGRACSNPSFLRFQLDFYQVYFLALAADWLQAPYLYKLYQHYYFLEGQIAILYVCGLASTVLFGLVASSLVDWLGRKNSCVLFSLTYSLCCLTKLSQDYFVLLVGRALGGLSTALLFSAFEAWYIHEHVERHDFPAEWIPATFARAAFWNHVLAVVAGVAAEAVASWIGLGPVAPFVAAIPLLALAGALALRNWGENYDRQRAFSRTCAGGLRCLLSDRRVLLLGTIQALFESVIFIFVFLWTPVLDPHGAPLGIIFSSFMAASLLGSSLYRIATSKRYHLQPMHLLSLAVLIVVFSLFMLTFSTSPGQESPVESFIAFLLIELACGLYFPSMSFLRRKVIPETEQAGVLNWFRVPLHSLACLGLLVLHDSDRKTGTRNMFSICSAVMVMALLAVVGLFTVVRHDAELRVPSPTEEPYAPEL

SEQ ID NO: 4606 - protein, 419 aa, Homo sapiens
  SITE (147): Xaa equals any amino acid
  SITE (329): Xaa equals any amino acid
  SITE (399): Xaa equals any amino acid
  SITE (403): Xaa equals any amino acid
  SITE (405): Xaa equals any amino acid
  SITE (412): Xaa equals any amino acid
  SITE (413): Xaa equals any amino acid
MLVTAYLAFVGLLASCLGLELSRCRAKPPGRACSNPSFLRFQLDFYQVYFLALAADWLQAPYLYKLYQHYYFLEGQIAILYVCGLASTVLFGLVASSLVDWLGRKNSCVLFSLTYSLCCLTKLSQDYFVLLVGRALGGLSTALLFSXFEAWYIHEHVERHDFPAEWIPATFARAAFWNHVLAVVAGVAAEAVASWIGLGPVAPFVAAIPLLALAGALALRNWGENYDRQRAFSRTCAGGLRCLLSDRRVLLLGTIQALFESVIFIFVFLWTPVLDPHGAPLGIIFSSFMAASLLGSSLYRIATSKRYHLQPMHLLSLAVLIVVFSLFMXLSLPAQARRVRWKSFIAFLLIELACGLYFPSMSFLRRKVILSRQAVYSTGSGYLDYCLLGFLSHDRIEKXLGMXIXCACMLLXXDFTGKI

SEQ ID NO: 4607 - protein, 450 aa, Homo sapiens; identical to SEQ ID NO: 4605

SEQ ID NO: 4608 - protein, 106 aa, Homo sapiens
MQTKKNEIWVGIFLLAALLAALFVCLKAANVTSIRTEPTYTLYATFDNIGGLKARSPVSIGGVVVGRVADITLDPKTYLPRVTLEIEQRYNHIPDTSSLSIRTSGL

SEQ ID NO: 4609 - protein, 112 aa, Homo sapiens; identical to SEQ ID NO: 3262

SEQ ID NO: 4610 - protein, 55 aa, Homo sapiens
  SITE (6): Xaa equals any amino acid
MGILNXGAACCLLTAWKGKILCLFFSVFFSVFSVSSFAQTCEHQRADGFQTRTLP

SEQ ID NO: 4611 - protein, 199 aa, Homo sapiens; identical to SEQ ID NO: 3265

SEQ ID NO: 4612 - protein, 89 aa, Homo sapiens
EIIQPSPLMLQSRRQMPKQEKALAHGHTAGCHKTKMAALPQRASLPLPEPGSPIKPTSCLKSISGSLTSNRPWEPPGGKSASARVQALG

SEQ ID NO: 4613 - protein, 75 aa, Homo sapiens
GKVKAGKVDCQAYAQTAQKAGIRAYPTVKFYFYERAKRNFQEEQINTRDAKAIAALISEKLETLRNQGKRNKDEL

SEQ ID NO: 4614 - protein, 199 aa, Homo sapiens; identical to SEQ ID NO: 3265

SEQ ID NO: 4615 - protein, 20 aa, Homo sapiens
PRPHAPMPGRGQGPEKALHP

SEQ ID NO: 4616 - protein, 235 aa, Homo sapiens [sequence omitted]

SEQ ID NO: 4617 - protein, 12 aa, Homo sapiens
MSGIWGFCLFLL

SEQ ID NO: 4618 - protein, 217 aa, Homo sapiens; identical to SEQ ID NO: 3011

SEQ ID NO: 4619 - protein, 217 aa, Homo sapiens
MGSTVPRSASVLLLLLLLRRAEQPCGAELTFELPDNAKQCFHEEVEQGVKFSLDYQVITGGHYDVDCYVEDPQGNTIYRETKKQYDSFTYRAEVKGVYQFCFSNEFSTFSHKTVYFDFQVGDEPPILPDMGNRVTALTQMESACVTIHEALKTVIDSQTHYRLREVQDRARAEDLNSRVSYWSVGETIALFVVSFSQVLLLKSFFTEKRPISRAVHS

SEQ ID NO: 4620 - protein, 25 aa, Homo sapiens
MLGNCAACPVGWWLHYVLGCACGSI

SEQ ID NO: 4621 - protein, 16 aa, Homo sapiens
PSHCLTDCFLYIVAKS

SEQ ID NO: 4622 - protein, 79 aa, Homo sapiens; identical to SEQ ID NO: 3272

SEQ ID NO: 4623 - protein, 79 aa, Homo sapiens; identical to SEQ ID NO: 3272

SEQ ID NO: 4624 - protein, 20 aa, Homo sapiens
ILLLPVLILIVKKTVEIRVQ

SEQ ID NO: 4625 - protein, 215 aa, Homo sapiens
  SITE (94): Xaa equals any amino acid
  SITE (162): Xaa equals any amino acid
  SITE (180): Xaa equals any amino acid
MFCPLKLILLPVLLDYSLGLNDLNVSPPELTVHVGDSALMGCVFQSTEDKCIFKIDWTLSPGEHAKDEYVLYYYSNLSVPIGRFQNRVHLMGDXLCNDGSLLLQDVQEADQGTYICEIRLKGESQVFKKAVVLHVLPEEPKELMVHVGGLIQMGCVFQSTEXKHVTKVRMDIFRTARKGXDCISLLPQTQDVCGVLPELGPLPESCEPGGGHFPQ

SEQ ID NO: 4626 - protein, 114 aa, Homo sapiens; identical to SEQ ID NO: 3274

SEQ ID NO: 4627 - protein, 325 aa, Homo sapiens; identical to SEQ ID NO: 3275

SEQ ID NO: 4628 - protein, 315 aa, Homo sapiens
  SITE (296): Xaa equals any amino acid
  SITE (312): Xaa equals any amino acid
CRKLAVAHPLLLLRHLPMIAALLHGRTHLNFQEFRQQNHLSCFLHVLGLLELLQPHVFRSEHQGALWDCLLSFIRLLLNYRKSSRHLAAFINKFVQFIHKYITYNAPAAISFLQKHADPLHDLSFDNSDLVMLKSLLAGLSLPSRDDRTDRGLDEEGEEESSAGSLPLVSVSLFTPLTAAEMAPYMKRLSRGQTVEDLLEVLSDIDEMSRRRPEILSFFSTNLQRLMSSAEECCRNLAFSLALRSMQNSPSIAAAFLPTFMYCLGSQDFEVVQTALRNLPEYALLCQEHAAVLLSXPSWWACTARWTPARRXPRP

SEQ ID NO: 4629 - protein, 53 aa, Homo sapiens
VLLRKLCLPMLCFLLHTILHSTGQYQECLQLADMVSSERHKLYLVFSKEELPP

SEQ ID NO: 4630 - protein, 594 aa, Homo sapiens
  SITE (181): Xaa equals any amino acid
LLLLLLLPPLLCGRVGAKEQKDYLLTMQKSVTVQEGLCVSVLCSFSYPQNGWTASDPVHGYWFRAGDHVSRNIPVATNNPARAVQEETRDRFHLLGDPQNKDCTLSIRDTRESDAGTYVFCVERGNMKWNYKYDQLSVNVTASQDLLSRYRLEVPESVTVQEGLCVSVPCSVLYPHYNWTXSSPVYGSWFKEGADIPWDIPVATNTPSGKVQEDTQGRFLLLGDPQTNNCSLSIRDARKGDSGKYYFQVERGSRKWNYIYDKLSVHVTALTHMPTFSIPGTLESGHPRNLTCSVPWACEQGTPPTITWMGASVSSLDPTITRSSMLSLIPQPQDHGTSLTCQVTLPGAGVTMTRAVRLNISYPPQNLTMTVFQGDGTASTTLRNGSALSVLEGQSLHLVCAVDSNPPARLSWTWGSLTLSPSQSSNLGVLELPRVHVKDEGEFTCRAQNPLGSQHISLSLSLQNEYTGKMRPISGVTLGAFGGAGATALVFLYFCIIFVVVRSCRKKSARPAVGVGDTGMEDANAVRGSASQGPLIESPADDSPPHHAPPALATPSPEEGEIQYASLSFHKARPQYPQEQEAIGYEYSEINIPK

SEQ ID NO: 4631 - protein, 33 aa, Homo sapiens
IVIRIIIPMCWGRDLVGGDRIMGVVPPCCSDSE

SEQ ID NO: 4632 - protein, 225 aa, Homo sapiens
MLLLLLLLPLLWGTKGMEGDRQYGDGYLLQVQELVTVQEGLCVHVPCSFSYPQDGWTDSDPVHGYWFRAGDRPYQDAPVATNNPDREVQAETQGRFQLLGDIWSNDCSLSIRDARKRDKGSYFFRLERGSMKWSYKSQLNYKTKQLSVFVTALTHRPDILILGTLESGHSRNLTCSVPWACKQGTPPMISWIGASVSSPGPTTARSSVLPLPQSPRTTAPASPVR

SEQ ID NO: 4633 - protein, 43 aa, Homo sapiens
  SITE (34): Xaa equals any amino acid
  SITE (35): Xaa equals any amino acid
WWYWERGATSRGFSASLLPASYHLLGSLVWPLSXXWDSLVSEL

SEQ ID NO: 4634 - protein, 307 aa, Homo sapiens
  SITE (6): Xaa equals any amino acid
  SITE (82): Xaa equals any amino acid
RVLPKXRKMDSLLPLPEPYVVPGGRFREVYYWDSYFTMLGLAESGHWDKVADMVANFAHEIDTYGHIPNGNRSYYLSRSQPXFFALMVELLAQHEGDAALKQYLPQMQKEYAYWMDGVENLQAGQQEKRVVKLQDGTLLNRYWDDRDTPRPESWVEDIATAKSNPNRPATEIYRDLRSAAASGWDFSSRWMDNPQQLNTLRTTSIVPVDLNSLMFKMEKILARASKAAGDNAMANQYETLANARQKGIEKYLWNDQQGWYADYDLKSHKVRNQLTAAALFRCTSMRQRKIAPTKWRRRRNTSAEPGG

SEQ ID NO: 4635 - protein, 862 aa, Homo sapiens
  SITE (3): Xaa equals any amino acid
  SITE (274): Xaa equals any amino acid
IVXRLTIGRIGYRAPPRAGCASLLRDILRNEDSGSETAYLENRSNSRPLESKRYGSKKKRHEKHTIPLVVQKETSSSDNKKQIPNEASARSERDTSDLEQNWSLQDHYRMYSPIIYQALCEHVQTQMSLMNDLTSKNIPNGIPAVPCHAPSHSESQATPHSSYGLCTSTPVWSLQRPPCPPKVHSEVQTDGNSQFASQGKTVSATCTDVLRNSFNTSPGVPCSLPKTDISAIPTLQQLGLVNGILPQQGIHKETDLLKCIQTYLSLFRSHGKEXHLDSQTHRSPTQSQPAFLATNEEKCAREQIREATSERKDLNIHVRDTKTVKDVQKAKNVNKTAEKVRIIKYLLGELKALVAEQEDSEIQRLITEMEACISVLPTVSGNTDIQVEIALAMQPLRSENAQLRRQLRILNQQLREQQKTQKPSGAVDCNLELFSLQSLNMSLQNQLEESLKSQELLQSKNEELLKVIENQKDENKKFSSIFKDKDQTILENKQQYDIEITRIKIELEEALVNVKSSQFKLETAEKENQILGITLRQRDAEVTRLRELTRTLQTSMAKLLSDLSVDSARCKPGNNLTKSLLNIHDKQLQHDPAPAHTSIMSYLNKLETNYSFTHSEPLSTIKNEETIEPDKTYENVLSSRGPQNSNTRGMEEASAPGIISALSKQDSDEGSETMALIEDEHNLDNTIYIPFARSTPEKKSPLSKRLSPQPQIRAATTQLVSNSGLAVSGKENKLCTPVICSSSTKEAEDAPEKLSRASDMKDTQLLKKIKEAIGKIPAATKEPEEQTACHGPSGCLSNSLQVKGNTVCDGSVFTSDLMSDWSISSFSTFTSRDEQDFRNGLAALDANIARLQKSLRTGLLEK

SEQ ID NO: 4636 - protein, 20 aa, Homo sapiens
FCFCNLKIFILGFVAFLLIW

SEQ ID NO: 4637 - protein, 27 aa, Homo sapiens
MGQKFFQTVPWALTWVVLVIQQKHCTN

SEQ ID NO: 4638 - protein, 27 aa, Homo sapiens
MGQKFFQTVPWALTWVVLVIQQKHCTN

SEQ ID NO: 4639 - protein, 2 aa, Homo sapiens
WQ

SEQ ID NO: 4640 - protein, 27 aa, Homo sapiens
MGQKFFQTVPWALTWVVLVIQQKHCTN

SEQ ID NO: 4641 - protein, 65 aa, Homo sapiens; identical to SEQ ID NO: 3280

SEQ ID NO: 4642 - protein, 81 aa, Homo sapiens
GHRHHVRRLCNGLLIYRDRLRINRFAWPKILKISYKRSNFYIKIRSHPQGQRHPAQPEACDGEEEADPPHQELLSPLPPEQ

SEQ ID NO: 4643 - protein, 379 aa, Homo sapiens
  SITE (359): Xaa equals any amino acid
MARRSAFPAAALWLWSILLCLLALRAEAGPPQEESLYLWIDAHQARVLIGFEEDILIVSEGKMAPFTHDFRKAQQRMPAIPVNIHSMNFTWQAAGQAEYFYEFLSLRSLDKGIMADPTVNVPLLGTVPHKASVVQVGFPCLGKQDGVAAFEVDVIVMNSEGNTILQTPQNAIFFKTCQQAECPGGCRNGGFCNERRICECPDGFHGPHCEKALCTPRCMNGGLCVTPGFCICPPGFYGVNCDKANCSTTCFNGGTCFYPGKCICPPGLEGEQCEISKCPQPCRNGGKCIGKSKCKCSKGYQGDLCSKPVCEPGCGAHGTCHEPNKCQCQEGWHGRHCNKRYEASLIHALRPAGAQLRQXTPSLKKAEERRDPPESNYIW

SEQ ID NO: 4644 - protein, 321 aa, Homo sapiens; identical to SEQ ID NO: 3900

SEQ ID NO: 4645 - protein, 1 aa, Homo sapiens
C

SEQ ID NO: 4646 - protein, 63 aa, Homo sapiens
MRDCLSLKPRPLFPTQFFFILLLIFIAEVAAAVVALVYTTMVRHWDGGREEDWAKPWEWAVAL

SEQ ID NO: 4647 - protein, 17 aa, Homo sapiens
LKPPPANLTPFMVVFHT

SEQ ID NO: 4648 - protein, 3 aa, Homo sapiens
ELS

SEQ ID NO: 4649 - protein, 261 aa, Homo sapiens
  SITE (203): Xaa equals any amino acid
  SITE (205): Xaa equals any amino acid
  SITE (232): Xaa equals any amino acid
MQLVILRVTIFLPWCFAVPVPPAADHKGWDFVEGYFHQFFLTEKESPLLTQETQTQLLQQFHRNGTDLLDMQMHALLHQPHCGVPDGSDTSISPGRCKWNKHTLTYRIINYPHDMKPSAVKDSIYNAVSIWSNVTPLIFQQVQNGDADIKVSFWQWAHEDGWPFDGPGGILGHAFLPNSGNPGVVHFDKNEHWSASDTGYNLXLXATHEIGHSLGLQHSGNQSSIMYPTYWXHDPRTFQLSADDIQRIQHLYGEKCSSDIP

SEQ ID NO: 4650 - protein, 260 aa, Homo sapiens
QLVILRVTIFLPWCFAVPVPPAADHKGWDFVEGYFHQFFLTEKESPLLTQETQTQLLQQFHRNGTDLLDMQMHALLHQPHCGVPDGSDTSISPGRCKWNKHTLTYRIINYPHDMKPSAVKDSIYNAVSIWSNVTPLIFQQVQNGDADIKVSFWQWAHEDGWPFDGPGGILGHAFLPNSGNPGVVHFDKNEHWSASDTGYNLFLVATHEIGHSLGLQHSGNQSSIMYPTYWYHDPRTFQLSADDIQRIQHLYGEKCSSDIP

SEQ ID NO: 4651 - protein, 261 aa, Homo sapiens; identical to SEQ ID NO: 3285

SEQ ID NO: 4652 - protein, 193 aa, Homo sapiens [sequence omitted]

SEQ ID NO: 4653 - protein, 3 aa, Homo sapiens
FYF

SEQ ID NO: 4654 - protein, 172 aa, Homo sapiens
MPRPGSAQRWAAVAGRWGCRLLALLLLVPGPGGASEITFELPDNAKQCFYEDIAQGTKCTLEFQVITGGHYDVDCRLEDPDGKVLYKEMKKQYDSFTFTASKNGTYKFCFSNEFSTFTHKTVYFDFQVGEDPPLFPSENRVSALTQVNKKISNIMLVYLKGGKKHNLISCTN

SEQ ID NO: 4655 - protein, 18 aa, Homo sapiens
MSTLSVHWLLLRVSLKVR

SEQ ID NO: 4656 - protein, 246 aa, Homo sapiens; identical to SEQ ID NO: 3290

SEQ ID NO: 4657 - protein, 246 aa, Homo sapiens; identical to SEQ ID NO: 3290

SEQ ID NO: 4658 - protein, 120 aa, Homo sapiens
IQPPDPRNMTLAAYKEKMKELPLVSLFCSCFLADPLNKSSYKYEADTVDLNWCVISDMEVIELNKCTSGQSFEVILKPPSFDGVPEFNASLPRRRDPSLEEIQKKLEAAEERRKYQEAES

SEQ ID NO: 4659 - protein, 95 aa, Homo sapiens; identical to SEQ ID NO: 3291

SEQ ID NO: 4660 - protein, 95 aa, Homo sapiens; identical to SEQ ID NO: 3291

SEQ ID NO: 4661 - protein, 190 aa, Homo sapiens
  SITE (47): Xaa equals any amino acid
  SITE (126): Xaa equals any amino acid
GTWGCLKRRWSSSLQTMDLRPCVCPEAAAPVSCGVERERPTRAVSEXPALAFWQVHIAPGVTHELASSLDLLPTLAALAGAPLPNVTLDGFDLSPLLLGTGKSPRQSLFFYPSYPDEVRGVFAVRXGKYKAHFFTQGSATSDTTADPACHASSSLTAHEPPLLYDLSKDPGENYNLLGGVAGATQRCCKP

SEQ ID NO: 4662 - protein, 158 aa, Homo sapiens
  SITE (2): Xaa equals any amino acid
  SITE (5): Xaa equals any amino acid
WXPRXAGIRHECKAPDFWGKLYPTGLPSELGSLSTVEHTCVHGSKGCVPSHPRCLLCAFHSLLPDYTTAPAPPSAIPILPGQCAPALSRKGGVGVAVQQDWGLPHPSFSTIPASQDIRQSSPDPPPCRYQFPNRAKYSISIVTALYSIFHKLYSKWSA

SEQ ID NO: 4663 - protein, 165 aa, Homo sapiens
MKTLFLGVTLGLAAALSFTLEEEDITGTWYVKAMVVDKDFPEDRRPRKVSPVKVTALGGGKLEATFTFMREDRCIQKKILMRKTEEPGKYSACLSAVEMDQITPALWEALAIDTLRKLRIGTRRPRIRWGQEAHVPAGAAQEGPLHLLLQRPAPWGPAPHGKACG

SEQ ID NO: 4664 - protein, 173 aa, Homo sapiens
  SITE (89): Xaa equals any amino acid
MKTLFLGVTLGLAAALSFTLEEEDITGTWYVKAMVVDKTFRRQEAQKVSPVKVTALGGGKLEATFTFMREDRCIQKKILMRKTEEPGKXSACEPLPHSHPHPPPPPTPVHQPPQVESAQAALLPGPQLCPPPRRGWPLLPGGLVALTSDTGCDRLVRSRDGPDHACPLGGPSH

SEQ ID NO: 4665 - protein, 173 aa, Homo sapiens
MKTLFLGVTLGLAAALSFTLEEEDITGTWYVKAMVVDKTFRRQEAQKVSPVKVTALGGGKLEATFTFMREDRCIQKKILMRKTEEPGKYSACEPLPHSHPHPPPPPTPVHQPPQVESAQAALLPGPQLCPPPRRGWPLLPGGLVALTSDTGCDRLVRSRDGPDHACPLGGPSH

SEQ ID NO: 4666 - protein, 109 aa, Homo sapiens [sequence omitted]

SEQ ID NO: 4667 - protein, 12 aa, Homo sapiens
LGVVTTELLVTI

SEQ ID NO: 4668 - protein, 24 aa, Homo sapiens
MVELWSQRKWVSSAQSCCFYFSHF

SEQ ID NO: 4669 - protein, 256 aa, Homo sapiens
MACKGLLQQVQGPRLPWTRLLLLLLVFAVGFLCHDLRSHSSFQASLTGRLLRSSGFLPASQQACAKLYSYSLQGYSWLGETLPLWGSHLLTVVRPSLQLAWAHTNATVSFLSAHCASHLAWFGDSLTSLSQRLQIQLPDSVNQLLRYLRELPLLFHQNVLLPLWHLLLEALAWAQEHCHEACRGEVTWDCMKTQLSEAVHWTWLCLQDITVAFLDWALAPDIPAVGPAFLATDFCMGRPSKTAAGRRWQFLHGSLF

SEQ ID NO: 4670 - protein, 136 aa, Homo sapiens
GFGATLAVGLTIFVLSVVTIIICFTCSCCCLYKTCRRPRPVVTTTTSTTVVHAPYPQPPSVPPSYPGPSYQGYHTMPPQPGMPAAPYPMQYPPPYPAQPMGPPAYHETLAGGAAAPYPASQPPYNPAYMDAPKAAL

SEQ ID NO: 4671 - protein, 155 aa, Homo sapiens
GFGATLAVGLTIFVLSVVTIIICFTCSCCCLYKHVPPTTSGCHHHHIHHCGACPLSSASKCAAQLPWTKLPGLPHHAASARDASSTLPNAVPTTLPSPAHGPTGPTTRPWLGEQPRPTPPASLLTTPAYMDAPEGGPLSIPWALLAATWLCCLCA

SEQ ID NO: 4672 - protein, 153 aa, Homo sapiens
GFGATLAVGLTIFVLSVVTIIICFTCSCCCLYKTCRRPRPVVTTTTSTTVVHAPYPQPPSVPPSYPGPSYQGYHTMPPQPGMPAAPYPMQYPPPYPAQPMGPPAYHETLAGEQPRPTPPASLLTTRPTWMPRRRPSEHSLASLAATWLCCVCA

SEQ ID NO: 4673 - protein, 83 aa, Homo sapiens; identical to SEQ ID NO: 3299

SEQ ID NO: 4674 - protein, 28 aa, Homo sapiens
MQAPEPRRPVVLASGCPGLLSLRLALFY

SEQ ID NO: 4675 - protein, 95 aa, Homo sapiens
  SITE (53): Xaa equals any amino acid
  SITE (57): Xaa equals any amino acid
VIFHCVHSPVGGHLDHFPFGIIRNNIAMNINVKVCFIVFVFVFLFFIVVVFEXGSCXVTQAGVQWHDLGSLQPPAPRFKQFSCLSLPSSWDYRLE

SEQ ID NO: 4676 - protein, 93 aa, Homo sapiens; identical to SEQ ID NO: 3301
  SITE (64): Xaa equals any amino acid

SEQ ID NO: 4677 - protein, 307 aa, Homo sapiens [sequence omitted]

SEQ ID NO: 4678 - protein, 54 aa, Homo sapiens
WVSMWMRPTRFWLSSWFQTSTTKPSKCWFFATWTTVLLSSSISSSLSKTFRKSS

SEQ ID NO: 4679 - protein, 347 aa, Homo sapiens
MRTLFNLLWLALACSPVHTTLSKSDAKKAASKTLLEKSQFSDKPVQDRGLVVTDLKAESVVLEHRSYCSAKARDRHFAGDVLGYVTPWNSHGYDVTKVFGSKFTQISPVWLQLKRRGREMFEVTGLHDVDQGWMRAVRKHAKGLHIVPRLLFEDWTYDDFRNVLDSEDEIEELSKTVVQVAKNQHFDGFVVEVWNQLLSQKRVGLIHMLTHLAEALHQARLLALLVIPPAITPGTDQLGMFTHKEFEQLAPVLDGFSLMTYDYSTAHQPGPNAPLSWVRACVQVLDPKSKWRSKILLGLNFYGMDYATSKDAREPVVGARYIQTLKDHRPRMVWDSQASEHFFEYKK

SEQ ID NO: 4680 - protein, 284 aa, Homo sapiens
GSAGIPGRPTRPEHLTMLGITVLAALLACASSCGVPSFPPNLSARVVGGEDARPHSWPWQISLQYLKNDTWRHTCGGTLIASNFVLTAAHCISNTRTYRVAVGKNNLEVEDEEGSLFVGVDTIHVHKRWNALLLRNDIALIKLAEHVELSDTIQVACLPEKDSLLPKDYPCYVTGWGRLWTNGPIADKLQQGLQPVVDHATCSRIDWWGFRVKKTMVCAGGDGVISACNGDSGGPLNCQLENGSWEVFGIVSFGSRRGCNTRKKPVVYTRVSAYIDWINEKMQL

SEQ ID NO: 4681 - protein, 16 aa, Homo sapiens
  SITE (7): Xaa equals any amino acid
PHSIPIXLALPHLVGQ

SEQ ID NO: 4682 - protein, 12 aa, Homo sapiens
STRGSWGRTTLM

SEQ ID NO: 4683 - protein, 63 aa, Homo sapiens; identical to SEQ ID NO: 3303

SEQ ID NO: 4684 - protein, 105 aa, Homo sapiens
  SITE (80): Xaa equals any amino acid
  SITE (82): Xaa equals any amino acid
CKWRIAIHNVPINLYIHKNCMKVPFCLYPRQHWYQNVFILKDKKGRKDIKLFLFVFLFFFNNRNITLSQGSCRYISHYPXDXFSPRAEFLQPGGSTSSRAAATAV

SEQ ID NO: 4685 - protein, 27 aa, Homo sapiens
VDRVHRPHFGTLSSLQESVIYWAQIPT

SEQ ID NO: 4686 - protein, 50 aa, Homo sapiens
  SITE (12): Xaa equals any amino acid
MPRPWPSPLCLXFTGREPTVPGLQLHFLKTTFGLGIIIKIRKQDSIKISF

SEQ ID NO: 4687 - protein, 198 aa, Homo sapiens
LHLHLDLQHLPPLHLELPLPAEDLVADGALHAVAGHDDHVLFVSGPFPEDLQGLPSVQHSWRGKHNHRSWVVSKSPVEGLDVLELKHVPLHKSLADLLVGPGDEQLVVVVGLLGQPRGEVDGHLQVHALPEGLQEDAELLGAAQREHRYQHLPTTLHGLVDFLQEVSLPAALGVTDGRGVRGLCDEQVGAALVNPGSS

SEQ ID NO: 4688 - protein, 71 aa, Homo sapiens [sequence omitted]

SEQ ID NO: 4689 - protein, 84 aa, Homo sapiens; identical to SEQ ID NO: 3311

SEQ ID NO: 4690 - protein, 172 aa, Homo sapiens
KINLFAMFGTGIAMSTWVWTKATLLIWRRTWCRLTGQSDDEPKRIKKSKMIADRERGPWSPTHSAQSPVPLRIHFCPVHRPPWHGLMAATGPGAYSLPHQPDGHRTHGCRLGLLSLQSRTWDRKERNQYLQGSSSYRACFPRIPSSENLWADCPSKRVLDVWLKAAGLWERA

SEQ ID NO: 4691 - protein, 11 aa, Homo sapiens
SVYKIDCIFIY

SEQ ID NO: 4692 - protein, 40 aa, Homo sapiens
CKCYDVKCILTVMLTVNYLRCYIRLKIPFYSLLLRDFYNK

SEQ ID NO: 4693 - protein, 41 aa, Homo sapiens
  SITE (7): Xaa equals any amino acid
MEYTFSXCFLSVIAVACVFIFFFNSGFAYPKATKIFSFIFF

SEQ ID NO: 4694 - protein, 47 aa, Homo sapiens
LCVIIYLYGVYFLQNFSTRECTCSLQLLSVYSSRQWIKPDSHSLRLS

SEQ ID NO: 4695 - protein, 70 aa, Homo sapiens
MVLASALLCVIVSVLTNVLVGGNTPRKNPMHPSSRWSELDLLILLGTAGHVLSLGATASWRRSTRPGTSL

SEQ ID NO: 4696 - protein, 14 aa, Homo sapiens
CIIFSPIDNHSRSF

SEQ ID NO: 4697 - protein, 84 aa, Homo sapiens [sequence omitted]

SEQ ID NO: 4698 - protein, 125 aa, Homo sapiens; identical to SEQ ID NO: 3320

SEQ ID NO: 4699 - protein, 127 aa, Homo sapiens
VTVMQFNFELSFKYVLYSSYSWLKLDHTIADCMVFTWTPCRMLDYLYSSYANMLWAGEMKSSSHQDLLFKWLDNWATKELELHLLGFELFWNTLLHFGKSKSSASGALSIENLPSFALKDVLFFIYT

SEQ ID NO: 4700 - protein, 50 aa, Homo sapiens
  SITE (3): Xaa equals any amino acid
  SITE (36): Xaa equals any amino acid
  SITE (49): Xaa equals any amino acid
MRXDDFISIWAFSLLALALSCHPVKKVSASSCLLPXCKFPEISLVVQRXE

SEQ ID NO: 4701 - protein, 63 aa, Homo sapiens; identical to SEQ ID NO: 3322

SEQ ID NO: 4702 - protein, 52 aa, Homo sapiens
MRADDFIRGFPFCLVLILSCLPPCKTCLSVMLVRPPQPRGAVSSLNLFFFIN

SEQ ID NO: 4703 - protein, 33 aa, Homo sapiens
GFPFHIALTEVLHEGLTPVANFCLDIHAFPYIL

SEQ ID NO: 4704 - protein, 76 aa, Homo sapiens
ASRPVMGGTAAKVSDMPCRHFPHVLVINIWLLVTYANFCRGLEFILRKWVFLFYLIIRLQIFQTFIVCFPFKTECF

SEQ ID NO: 4705 - protein, 76 aa, Homo sapiens; identical to SEQ ID NO: 4704

SEQ ID NO: 4706 - protein, 76 aa, Homo sapiens; identical to SEQ ID NO: 4704

SEQ ID NO: 4707 - protein, 63 aa, Homo sapiens; identical to SEQ ID NO: 3322

SEQ ID NO: 4708 - protein, 73 aa, Homo sapiens [sequence omitted]

SEQ ID NO: 4709 - protein, 57 aa, Homo sapiens; identical to SEQ ID NO: 3323

SEQ ID NO: 4710 - protein, 57 aa, Homo sapiens; identical to SEQ ID NO: 3323

SEQ ID NO: 4711 - protein, 57 aa, Homo sapiens; identical to SEQ ID NO: 3323

SEQ ID NO: 4712 - protein, 29 aa, Homo sapiens
  SITE (23): Xaa equals any amino acid
  SITE (27): Xaa equals any amino acid
MPTVVLRRTPACAGGRSVYTEAXVTIXVG

SEQ ID NO: 4713 - protein, 143 aa, Homo sapiens
  SITE (42): Xaa equals any amino acid
  SITE (49): Xaa equals any amino acid
  SITE (128): Xaa equals any amino acid
  SITE (135): Xaa equals any amino acid
  SITE (143): Xaa equals any amino acid
MERRRWCSGTWFARCTLFRGRRPSPPGGSSLGASGCGPGRPXGAGPASXASGRVVGAQQELGALFVDAGVDAVCVLLRLGDAGAAHGDGDVGLGVDGTAAGAGGGAAQDDGGHVDRGAAEAHVLLAEXPGQRASXKVPLKTPX

SEQ ID NO: 4714 - protein, 102 aa, Homo sapiens
MTKTKSEIFGTLSWPWGMRAACASLWSTWRPVKTFSGRKSGSDETCPFHQSAIGDRLNSETQARVYQLQNLSKDSNYALKNSTRRSKKRCLYVKKCNRVALI

SEQ ID NO: 4715 - protein, 206 aa, Homo sapiens
MERRRWCSGTWFARCTLFRGRRPSPPGGSSLGASGCGPGRPPGAGPASGASGRVVGAQQELGALFVDAGVDAVCVLLRLGDAGAAHGDGDVGLGVDGTAAGAGGGAAQDDGGHVDRGAAEAHVLLAEQPGQAAPAQAVGFRQVPGVPRRVVGDSVGPGRHAAQVGGRPEAAVGGPAPCRAARVARLLTRPQLQRVVEGTEHGTSSC

SEQ ID NO: 4716 - protein, 206 aa, Homo sapiens; identical to SEQ ID NO: 4715

SEQ ID NO: 4717 - protein, 40 aa, Homo sapiens
  SITE (7): Xaa equals any amino acid
MQRLRFXFPELLGPQSLCLIIYLFIYLFAKNSPLQLIECT

SEQ ID NO: 4718 - protein, 1 aa, Homo sapiens
M

SEQ ID NO: 4719 - protein, 131 aa, Homo sapiens
NSARASLQLSQRKCSKTSVSAVPSKGQVRSSRRSWEMMSDGRQAWGLAGRREQLRGSQWTQTTSWGLQGASAEGSRKCASYCSLVSLILLLVLFLLHTFYFWLSVGHCCTFSSLTPLGKLLSVSVPLCLHV

SEQ ID NO: 4720 - protein, 1 aa, Homo sapiens
N

SEQ ID NO: 4721 - protein, 3 aa, Homo sapiens
LLL

SEQ ID NO: 4722 - protein, 558 aa, Homo sapiens
ADAFGNSEGKELVASGENKIKQGLLPSLEDLLFYTIAEGQEKIPVHKFITALKSTGLRTSDPRLKECMDMLRLTLQTTSDGVMLDKDLFKKCVQSNIVLLTQAFRRKFVIPDFMSFTSHIDELYESAKKQSGGKVADYIPQLAKFSPDLWGVSVCTVDGQRHSTGDTKVPFCLQSCVKPLKYAIAVNDLGTEYVHRYVGKEPSGLRFNKLFLNEDDKPHNPMVNAGAIVVTSLIKQGVNNAEKFDYVMQFLNKMAGNEYVGFSNATFQSERESGDRNFAIGYYLKEKKCFPEGTDMVGILDFYFQLCSIEVTCESASVMAATLANGGFCPITGERVLSPEAVRNTLSLMHSCGMYDFSGQFAFHVGLPAKSGVAGGILLVVPNVMGMMCWSPPLDKMGNSVKGIHFCHDLVSLCNFHNYDNLRHFAKKLDPRREGGDQRVKSVINLLFAAYTGDVSALRRFALSAMDMEQRDYDSRTALHVAAAEGHVEVVKFLLEACKVNPFPKDRWNNTPMDEALHFGHHDVFKILQEYQVQYTPQGDSDNGKENQTVHKNLDGLL

SEQ ID NO: 4723 - protein, 42 aa, Homo sapiens
MIFLPAAASFFRLSSTLAALPSVHCLNGASATCFKSARNRSI

SEQ ID NO: 4724 - protein, 38 aa, Homo sapiens
GCVCVRDTSDFSFLILCENLFSTDFPGFKHCLLYKKLY

SEQ ID NO: 4725 - protein, 90 aa, Homo sapiens
EHFFEVVISSEDSCVLFWFFFLSYSDSLLEQSIIFLWTYNFCLCCSHFVSENEYVCVNTQACVCMCTYMGQNEWMCVCEGYLRFFFSYFV

SEQ ID NO: 4726 - protein, 148 aa, Homo sapiens; identical to SEQ ID NO: 3335

SEQ ID NO: 4727 - protein, 48 aa, Homo sapiens; identical to SEQ ID NO: 3337

SEQ ID NO: 4728 - protein, 25 aa, Homo sapiens
LWLLGKASSMTISPHRTSSGPGDKP

SEQ ID NO: 4729 - protein, 258 aa, Homo sapiens
MGPSTPLLILFLLSWSGPLQGQQHHLVEYMERRLAALEERLAQCQDQSSRHAAELRDFKNKMLPLLEVAEKEREALRTEADTISGRVDRLEREVDYLETQNPALPCVEFDEKVTGGPGTKGKGRRNEKYDMVTDCGYTISQVRSMKILKRFGGPAGLWTKDPLGQTEKIYVLDGTQNDTAFVFPRLRDFTLAMAARKASRVRVPFPWVGTGQLVYGEHFAANQIPPGKPNSGGQLSIPSRGADPPLRLDSRHLHRPGS

SEQ ID NO: 4730 - protein, 258 aa, Homo sapiens; identical to SEQ ID NO: 4729

SEQ ID NO: 4731 - protein, 20 aa, Homo sapiens
MLLSVAIFILLTLVYAYWTM

SEQ ID NO: 4732 - protein, 20 aa, Homo sapiens
MLLSVAIFILLTLVYAYWTM

SEQ ID NO: 4733 - protein, 17 aa, Homo sapiens
LLRLRLMSQFKAARRPW

SEQ ID NO: 4734 - protein, 2 aa, Homo sapiens
YT

SEQ ID NO: 4735 - protein, 2 aa, Homo sapiens
YA

SEQ ID NO: 4736 - protein, 4 aa, Homo sapiens
VSNF

SEQ ID NO: 4737 - protein, 72 aa, Homo sapiens; identical to SEQ ID NO: 3343

SEQ ID NO: 4738 - protein, 138 aa, Homo sapiens; identical to SEQ ID NO: 3344

SEQ ID NO: 4739 - protein, 352 aa, Homo sapiens
CQCDSSTMISPVLILFSSFLCHVAIAGRTCPKPDDLPFSTVVPLKTFYEPGEEITYSCKPGYVSRGGMRKFICPLTGLWPINTLKCTPRVCPFAGILENGAVRYTTFEYPNTISFSCNTGFYLNGADSAKCTEEGKWSPELPVCAPIICPPPSIPTFATLRVYKPSAGNNSLYRDTAVFECLPQHAMFGNDTITCTTHGNWTKLPECREVKCPFPSRPDNGFVNYPAKPTLYYKDKATFGCHDGYSLDGPEEIECTKLGNWSAMPSCKASCKVPVKKATVVYQGERVKIQEKFKNGMLHGDKVSFFCKNKEKKCSYTEDAQCIDGTIEVPKCFKEHSSLAFWKTDASDVKPC

SEQ ID NO: 4740 - protein, 55 aa, Homo sapiens
  SITE (51): Xaa equals any amino acid
  SITE (55): Xaa equals any amino acid
SQLLRRLRHENCLNPGGRGCSKPRSWHCTLAWATEQDPVLKKKKKNSQGGXRYPX

SEQ ID NO: 4741 - protein, 53 aa, Homo sapiens
  SITE (26): Xaa equals any amino acid
MLKALFRTLQAMLLGVWILLLLASLXPLWLYCWRMFPTKGKRDQKEMLEVSGI

SEQ ID NO: 4742 - protein, 53 aa, Homo sapiens; identical to SEQ ID NO: 3754

SEQ ID NO: 4743 - protein, 418 aa, Homo sapiens
GLLFSTMAAQGYGYYRTVIFSFVMPSLVEEIPLDKDDLGFITSSQSAAYAISKFVSGVLSDQMSARWLFSSGLLLVGLVNIFFAWSSTVPVFAALWFLNGLAQGLGWPPCGKVLRKWFEPSQFGTWWAILSTSMNLAGGLGPILATILAQSYSWRSTLALSGALCVVVSFLCLLLIHNEPADVGLRNLDPMPSEGKKGSLKEESTLQELLLSPYLWVLSTGYLVVFGVKTCCTDWGQFFLIQEKGQSALVGSSYMSALEVGGLVGSIAAGYLSDRAMAKAGLSNYGNPRHGLLLFMMAGMTVSMYLFRVTVTSDSPKLWILVLGAVFGFSSYGPIALFGVIANESAPPNLCGTSHAIVGLMANVGGFLAGLPFSTIAKHYSWSTAFWVAEVICAASTAAFFLLRNIRTKMGRVSKKAE

SEQ ID NO: 4744 - protein, 316 aa, Homo sapiens
  SITE (10): Xaa equals any amino acid
GDGPFPAFCXKALQEMAKSLLKTASLSGRTKLLHQTGLSLYSTSHGFYEEEVKKTLQQFPGGSIDLQKEDNGIGILTLNNPSRMNAFSGVMMLQLLEKVIELENWTEGKGLIVRGAKNTFSSGSDLNAVKSLGTPEDGMAVCMFMQNTLTRFMRLPLISVALVQGWALGGGAEFTTACDFRLMTPESKIRFVHKEMGIIPSWGGTTRLVEIIGSRQALKVLSGALKLDSKNALNIGMVEEVLQSSDETKSLEEAQEWLKQFIQGPPEVIRALKKSVCSGRELYLEEALQNERDLLGTVWGGPANLEAIAKKGKFNK

SEQ ID NO: 4745 - protein, 28 aa, Homo sapiens
MLEASELCLCVFILDTICLEGLPQTRVS

SEQ ID NO: 4746 - protein, 17 aa, Homo sapiens
MVKITCICLTIMILLLS

SEQ ID NO: 4747 - protein, 251 aa, Homo sapiens [sequence omitted]

SEQ ID NO: 4748 - protein, 45 aa, Homo sapiens; identical to SEQ ID NO: 3349

SEQ ID NO: 4749 - protein, 29 aa, Homo sapiens
  SITE (10): Xaa equals any amino acid
  SITE (13): Xaa equals any amino acid
LLLLFWFLFXCLXLLRCNSYTSYTIIFTL

SEQ ID NO: 4750 - protein, 16 aa, Homo sapiens
  SITE (13): Xaa equals any amino acid
NLLANTFVFVFVXFFC

SEQ ID NO: 4751 - protein, 146 aa, Homo sapiens
ATAPDHIFVFIKSFSTINRVNNMATCKLQADTSSPSSHLLALFPMPRTWINPRLFSPTGPGKSRPVSCSSPPQNPEIIRAEPAEWSIRKQSNMKKGQSCSPGSQHLGLLTHSQEIELHLSQTPGECYVGLEANEVALFLSLKSDHL

SEQ ID NO: 4752 - protein, 126 aa, Homo sapiens
  SITE (96): Xaa equals any amino acid
  SITE (113): Xaa equals any amino acid
MVRITQTSSTILIAMLLNSLVGIVLFVSILWFKQGMAGFGELVSSVRWWTLIPGLLGSFFVFASISGYQNVGAATTIAVLVASQLIGGLMLDIFRXHGVPLRALFGPICGAIXLVVGAWLVARRSF

SEQ ID NO: 4753 - protein, 186 aa, Homo sapiens
  SITE (44): Xaa equals any amino acid
  SITE (53): Xaa equals any amino acid
GVASLRCQTPQKFRIMSLDPESISTDQGAAQVSCCGNCSRWSLXRWSPRTSWXRPEFLSTEESEDQPERLQFREARGSSPTTMPGRTIPRVTERKHWTPAVCPADSGVLGSQQRRVREEIQGPWLSHRIWYTFLPRRKFLQKGEDPTQTKNAGVRAFTKYLWCCRTCSKVLLAGTRYSSALSSSSK

SEQ ID NO: 4754 - protein, 135 aa, Homo sapiens; identical to SEQ ID NO: 3353

SEQ ID NO: 4755 - protein, 45 aa, Homo sapiens
HPRHIYYSAIRITSSGWVASCCLVDFCFTLTYSVLPSADSARLFG

SEQ ID NO: 4756 - protein, 323 aa, Homo sapiens
  SITE (165): Xaa equals any amino acid
  SITE (214): Xaa equals any amino acid
  SITE (310): Xaa equals any amino acid
  SITE (311): Xaa equals any amino acid
  SITE (312): Xaa equals any amino acid
  SITE (318): Xaa equals any amino acid
  SITE (319): Xaa equals any amino acid
MHLRHLFSSRLRGSLLLGSLLVVSSFSTQAAEEMLRKAVGKGAYEMAYSQQENALWLATSQSRKLDKGGVVYRLDPVTLEVTQRSITISKPFGATINNTTQTLWFGNTVNSAVTAIDAKTGEVKGRLVLDDRKRTEEVRPLQPRELVADDATNTVYISGIGKESXIWVVDGGNIKLKTAIQNTGKMSTGLALDSEGKRLYTTNADGELITIDTXDNKILSRKKLLDDGKEHFFINISLDTARQRAFITDSKAAEVLVVDTRNGNILAKVAAPESLAVLFNPARNEAYVTHRQTGKVSVIDAKSYKVVKTXXXQIGNTXXYTGA

SEQ ID NO: 4757 - protein, 198 aa, Homo sapiens
VPGDPAMVRAGAVGAHLPASGLDIFGDLKKMNKRQLYYQVLNFAMIVSSALMIWKGLIVLTGSESPIVVVLSGSMEPAFHRGDLLFLTNFREDPIRAGEIVVFKVEGRDIPIVHRVIKVHEKDNGDIKFLTKGDNNEVDDRGLYKEGQNWLEKKDVVGRARGFLPYVGMVTIIMNDYPKFKYALLAVMGAYVLLKRES

SEQ ID NO: 4758 - protein, 512 aa, Homo sapiens
RATCSAPNRGSSPLQPPAQRLISRSAPCSSSRGTRPEMESKALLVLTLAVWLQSLTASRGGVAAADQRRDFIDIESKFALRTPEDTAEDTCHLIPGVAESVATCHFNHSSKTFMVIHGWTVTGMYESWVPKLVAALYKREPDSNVIVVDWLSRAQEHYPVSAGYTKLVGQDVARFINWMEEEFNYPLDNVHLLGYSLGAHAAGIAGSLTNKKVNRITGLDPAGPNFEYAEAPSRLSPDDADFVDVLHTFTRGSPGRSIGIQKPVGHVDIYPNGGTFQPGCNIGEAIRVIAERGLGDVDQLVKCSHERSIHLFIDSLLNEENPSKAYRCSSKEAFEKGLCLSCRKNRCNNLGYEINKVRAKRSSKMYLKTRSQMPYKVFHYQVKIHFSGTESETHTNQAFEISLYGTVAESENIPFTLPEVSTNKTYSFLIYTEVDIGELLMLKLKWKSDSYFSWSDWWSSPGFAIQKIRVKAGETQKKVIFCSREKVSHLQKGKAPAVFVKCHDKSLNKKSG

SEQ ID NO: 4759 - protein, 121 aa, Homo sapiens
MRVLLFLLLSLFMLPAFSADNLLRWHDAQHFTVQASTPLKAKRAWKLCALYPSLKDSYWLSLNYGMQEAARRYGVDLKVLEAGGYSQLATQQAQIDQCKQWGAEAILLGSSTTSFPDCKSR

SEQ ID NO: 4760 - protein, 108 aa, Homo sapiens
SLIIDEAIMRVLLFLLLSLFMLPAFSADNLLRWHDAQHFTVQASTPLKAKRAWKLCALYPSLKDSYWLSLNYGMQEAARRYGVDLKVLEAGGYSQLATQQAQIDQCKQ

SEQ ID NO: 4761 - protein, 121 aa, Homo sapiens
MRVLLFLLLSLFMLPAFSADNLLRWHDAQHFTVQASTPLKAKRAWKLCALYPSLKDSYWLSLNYGMQEAARRYGVDLKVLEAGGYSQLATQQAQIDQCKQWAAEPILLGSSTTSFPDCKSR

SEQ ID NO: 4762 - protein, 49 aa, Homo sapiens; identical to SEQ ID NO: 3360

SEQ ID NO: 4763 - protein, 49 aa, Homo sapiens; identical to SEQ ID NO: 3360

SEQ ID NO: 4764 - protein, 21 aa, Homo sapiens
MHILCETNVYPLLLNFVLWIL

SEQ ID NO: 4765 - protein, 467 aa, Homo sapiens; identical to SEQ ID NO: 3242

SEQ ID NO: 4766 - protein, 467 aa, Homo sapiens; identical to SEQ ID NO: 3242

SEQ ID NO: 4767 - protein, 406 aa, Homo sapiens [sequence omitted]

SEQ ID NO: 4768 - protein, 363 aa, Homo sapiens
  SITE (8): Xaa equals any amino acid
EIENAVEXGRALLPILQWHKHPNDYFSKEASKLYFNSLRTYWQELIDLNTGESTDIDVKEALINAFKRLDNDISLEAQVGDPNSFLNYLVLRVAFSGATACVAHVDGVDLHVANTGDSRAMLGVQEEDGSWSAVTLSNDHNAQNERELERLKLEHPKSEAKSVVKQDRLLGLLMPFRAFGDVKFKWSIDLQKRVIESGPDQLNDNEYTKFIPPNYHTPPYLTAEPEVTYHRLRPQDKFLVLATDGLWETMHRQDVVRIVGEYLTGMHHQQPIAVGGYKVTLGQMHGLLTERRTKMSSVFEDQNAATHLIRHAVGNNEFGTVDHERLSKMLSLPEELARMYRDDITIIVVQFNSHVVGAYQNQE

SEQ ID NO: 4769 - protein, 215 aa, Homo sapiens
MSNAELALLLFIILTVGHYAVVWSIYLEKQLDELLSRKKREKKKKTGSKSVDVSKLGASEKNERLLMKPQWHDLLPCKLGIWFCLTLKALPHLIQDAGQFYAKYKETRLKEKEDALTRTELETLQKQKKVKKPKPEFPVYTPLETTYIQSYDHGTSIEEIEEQMDDWLENRNRTQKKQAPEWTEEDLSQLTRSMVKFPGGTPGRWEKLPTNWVDL

SEQ ID NO: 4770 - protein, 122 aa, Homo sapiens
MCWIMIWTSGVSLPPTSLIERLSLGSTRLILMLVISPSGIRWYNLGKTSGAVVFSEFSLPWSAWLATALPLFVLRRTLKARFIFLNDLLLIVDLSKGRALVRLLRPESTGLIAGCPSSAEDT

SEQ ID NO: 4771 - protein, 4 aa, Homo sapiens
FCLL

SEQ ID NO: 4772 - protein, 56 aa, Homo sapiens
  SITE (24): Xaa equals any amino acid
  SITE (51): Xaa equals any amino acid
DVYKRQVEKRQAAIHQVRKDRSPXKRRGVKIFFKLLSATVICVTVTFIFPXADGNS

SEQ ID NO: 4773 - protein, 185 aa, Homo sapiens
  SITE (143): Xaa equals any amino acid
  SITE (148): Xaa equals any amino acid
  SITE (169): Xaa equals any amino acid
  SITE (174): Xaa equals any amino acid
  SITE (176): Xaa equals any amino acid
  SITE (181): Xaa equals any amino acid
MNISLVWCLLVLSFAIKVLFSLTTHYFKVEDGGERSVCVTFGFFFFVKAMAVLIVTENYLEFGLETGFTNFSDSAMQFLEKQGLESQSPVSKLTFKFFLAIFCSFIGAFLTFPGLRLAQMHLDALNLATEKITQTLLHINFLXPLFMXLLWVKPITKDYIMNPPLGKEXIPLMXEXHISIXWEFG

SEQ ID NO: 4774 - protein, 185 aa, Homo sapiens
  SITE (176): Xaa equals any amino acid
KRKSMSIQHFRVALIPFFAAFCLPVFAHPETLVKVKDAEDQLGARVGYIELDLNSGKILESFRPEERFPMMSTFKVLLCGAVLSRIDAGQEQLGRRIHYSQNDLVEYSPVTEKHLTDGMTVRELCSAAITMSDNTAANLLLTTIGGPKELTAFLHNMGDHVTRLDRWEPELNEAYXTTSVTPRCL

SEQ ID NO: 4775 - protein, 4 aa, Homo sapiens
FCLL

SEQ ID NO: 4776 - protein, 419 aa, Homo sapiens
MKALLLLVLPWLSPANYIDNVGNLHFLYSELCKGASHYGLTKDRKRRSQDGCPDGCASLTATAPSPEVSAAATISLMTDEPGLDNPAYVSSAEDGQPAISPVDSGRSNRTRARPFERSTIRSRSFKKINRALSVLRRTKSGSAVANHADQGRENSENTTAPEVFPRLYHLIPDGEITSIKINRVDPSESLSIRLVGGSETPLVHIIIQHIYRDGVIARDGRLLPGDIILKVNGMDISNVPHNYAVRLLRQPCQVLWLTVMREQKFRSRNNGQAPDAYRPRDDSFHVILNKSSPEEQLGIKLVRKVDEPGVFIFNVLDGGVAYRHGQLEENDRVLAINGHDLRYGSPESAAHLIQASERRVHLVVSRQVRQRSPDIFQEAGWNSNGSWSPGPGERSNTPKPLHPTITCHEKVVNIQKRPR

SEQ ID NO: 4777 - protein, 113 aa, Homo sapiens
  SITE (91): Xaa equals any amino acid
RLQVPVRNSRVDPRVRGIHSVLQKRFCGLIQKHQQHQRGGDSFLSRFYSLALSPVKQLPSTASAGSSLDKGRKPARVGAIGSAGMSHCWRXLVFCLFLFCFVLFFETGSRSVA

SEQ ID NO: 4778 - protein, 189 aa, Homo sapiens; identical to SEQ ID NO: 3014

SEQ ID NO: 4779 - protein, 189 aa, Homo sapiens; identical to SEQ ID NO: 3014

SEQ ID NO: 4780 - protein, 204 aa, Homo sapiens
RFPTLPSQICTQCPGSVQNLSKVAFYCKTTRELMLHARCCLNQKGTILGLDLQNCSLEDPGPNFHQAHTTVIIDLQANPLKGDLANTFRGFTQLQTLILPQHVNCPGGINAWNTITSYIDNQICQGQKNLCNNTGDPEMCPENGSCVPDGPGLLQCVCADGFHGYKCMRQGSFSLLMFFGILGATTLSVSILLWATQRRKAKTS

SEQ ID NO: 4781 - protein, 5 aa, Homo sapiens
PIFIG

SEQ ID NO: 4782 - protein, 460 aa, Homo sapiens
  SITE (71): Xaa equals any amino acid
HIEPRWVMDVDTLLGEDVQLHTVGGTRAGVQGLAVHTGARHNLVLLLAAVLGQDGQDGRGQQDAVQHVDHXIGGHHVYPLQRDPLGSQQDAPLLRNVHSQDLVRHGEDPTLGDELLNGQLAVVVDVVPHQLLQFRETRCEEVDQAAVTQAVHSLIAWGKDCEGPRSVQDGGQPTVLQDGFKAAEGLGRGEDLSDSSLGIPRGPRGGLPPQASDHVEDAISCYVVGLVDVERLLGLVFVLVGVFRELVKGDGDLLPGQRPPPSCLLGPCVLQDVLPCDDVLSTELLGKGCIHGPGGEGGDGWHQHGERARCGKDFPAALVHHGHGDPQLQEHPACLRGLLHLVEQVSVAGTPIPHLAFPAHTAGLPISGHLASGRPVAGEGGAEGEAARRSVAVDADQAWPAGAEGLARLLVHTQSRVAGAATKVVSAWVLGQTHHPIAMVVLRAVTLSLPLGAHRALGQQ

SEQ ID NO: 4783 - protein, 70 aa, Homo sapiens; identical to SEQ ID NO: 3378

SEQ ID NO: 4784 - protein, 334 aa, Homo sapiens; identical to SEQ ID NO: 3379

SEQ ID NO: 4785 - protein, 24 aa, Homo sapiens
APQGGLMVRDGVVGNVCLWRICAL

SEQ ID NO: 4786 - protein, 286 aa, Homo sapiens; identical to SEQ ID NO: 3366

SEQ ID NO: 4787 - protein, 182 aa, Homo sapiens
MKGWGWLALLLGALLGTAWARRSQDLHCGACRALVDELEWEIAQVDPKKTIQMGSFRINPDGSQSVVEVPYARSEAHLTELLEEICDRMKEYGEQIDPSTHRKNYVRVVGRNGESSELDLQGIRIDSDISGTLKFACESIVEEYEDELIEFFSREADNVKDKLCSKRTDLCDHALHISHDEL

SEQ ID NO: 4788 - protein, 116 aa, Homo sapiens; identical to SEQ ID NO: 3382

SEQ ID NO: 4789 - protein, 63 aa, Homo sapiens; identical to SEQ ID NO: 3383

SEQ ID NO: 4790 - protein, 151 aa, Homo sapiens
NRCCLSDFWLNYQPLTSGDLGCKIIFSFACSYFIQKAQTRYIFPHKNVSSIMPRPGGRRGAAPTWPAAPSRREVGGASARLPRLGCGGGPSARPPPRLGGVPSSSLRTGHDDDGGFVEWKEGKCGERKKKSDCCCVCVERSRHGRLHFVLY

SEQ ID NO: 4791 - protein, 41 aa, Homo sapiens; identical to SEQ ID NO: 3384

SEQ ID NO: 4792 - protein, 68 aa, Homo sapiens
SHILKAKQTHRDGGGSWSQALRFLLFGADTSPYQLRFVSGPVVRRIEKALRDKFLTCVTIPRFPRLKS

SEQ ID NO: 4793 - protein, 54 aa, Homo sapiens
  SITE (36): Xaa equals any amino acid
LVLSAPPSRKCCYSEKAFNLQRPIATANLCCVEGDXSCEPADMYDKGTKWKARR

SEQ ID NO: 4794 - protein, 168 aa, Homo sapiens
  SITE (4): Xaa equals any amino acid
  SITE (10): Xaa equals any amino acid
  SITE (14): Xaa equals any amino acid
GEQXVGASNXVGGXLLELVNPPGLAGIRHEALGIQKRFSPEVLGLCASTALVWVVMEVLALLLGLYLATVRSDLSTFHLLAYSGYKYVGMILSVLTGLLFGSDGYYVALAWTSSALMYFIVRSLRTAALGPDSMGGPVPRQRLQLYLTLGAAAFQPLIIYWLTFHLVR

SEQ ID NO: 4795 - protein, 43 aa, Homo sapiens; identical to SEQ ID NO: 3388

SEQ ID NO: 4796 - protein, 347 aa, Homo sapiens
DDATDMVAETGGTRGRVARPGGLGRYPGRGAAASLVFVPTRRRTGPSGTASVAAMAYHSGYGAHGSKHRARAAPDPPPLFDDTSGGYSSQPGGYPATGADVAFSVNHLLGDPMANVAMAYGSSIASHGKDMVHKELHRFVSVSKLKYFFAVDTAYVAKKLGLLVFPYTHQKRFSPEVVMLLCPPGEDLNAPDLYIPTMAFITYVLLAGMALGIQKRFSPEVLGLCASTALVWVVMEVLALLLGLYLATVRSDLSTFHLLAYSGYKYVGMILSVLTGLLFGSDGYYVALAWTSSALMYFIVRSLRTAALGPDSMGGPVPRQRLQLYLTLGAAAFQPLIIYWLTFHLVR

SEQ ID NO: 4797 - protein, 33 aa, Homo sapiens; identical to SEQ ID NO: 3389

SEQ ID NO: 4798 - protein, 82 aa, Homo sapiens
  SITE (67): Xaa equals any amino acid
  SITE (69): Xaa equals any amino acid
MISYLCVCVVFFFFWKTESHTFAQAGVQWRDLGSLQPLPPGFKRFSCLSFPSSWDYRHTPQRLANFXIXSRDRVSPCWPGCS

SEQ ID NO: 4799 - protein, 263 aa, Homo sapiens; identical to SEQ ID NO: 3394

SEQ ID NO: 4800 - protein, 95 aa, Homo sapiens
  SITE (76): Xaa equals any amino acid
GARSLHTERTLFKCSVQNTLGHIVILGKQDNRGVNECFLSKSTAELLSIWYAHVANIGFFFLIYIFYFKTTKREGXDTIPHRDSHAECGLFKHAY

SEQ ID NO: 4801 - protein, 88 aa, Homo sapiens
  SITE (2): Xaa equals any amino acid
  SITE (38): Xaa equals any amino acid
CXGILTISTLIPHLCTEDSKGRPHQFHVRITRKEGTKXGEEDGPESVDRWVFAPPALGGRPSGARARTSQPVVSPSLTEVVDQKAVYF

SEQ ID NO: 4802 - protein, 448 aa, Homo sapiens
MPGIKRILTVTILALCLPSPGNAQAQCTNGFDLDRQSGQCLDIDECRTIPEACRGDMMCVNQNGGYLCIPRTNPVYRGPYSNPYSTPYSGPYPAAAPPLSAPNYPTISRPLICRFGYQMDESNQCVDVDECATDSHQCNPTQICINTEGGYTCSCTDGYWLLEGQCLDIDECRYGYCQQLCANVPGSYSCTCNPGFTLNEDGRSCQDVNECATENPCVQTCVNTYGSFICRCDPGYELEEDGVHCSDMDECSFSEFLCQHECVNQPGTYFCSCPPGYILLDDNRSCQDINECEHRNHTCNLQQTCYNLQGGFKCIDPIRCEEPYLRISDNRCMCPAENPGCRDQPFTILYRDMDVVSGRSVPADIFQMQATTRYPGAYYIFQIKSGNEGREFYMRQTGPISATLVMTRPIKGPREIQLDLEMITVNTVINFRGSSVIRLRIYVSQYPF

SEQ ID NO: 4803 - protein, 392 aa, Homo sapiens
MMCVNQNGGYLCIPRTNPVYRGPYSNPYSTPYSGPYPAAAPPLSAPNYPTISRPLICRFGYQMDESNQCVDVDECATDSHQCNPTQICINTEGGYTCSCTDGYWLLEGQCLDIDECRYGYCQQLCANVPGSYSCTCNPGFTLNEDGRSCQDVNECATENPCVQTCVNTYGSFICRCDPGYELEEDGVHCSDMDECSFSEFLCQHECVNQPGTYFCSCPPGYILLDDNRSCQDINECEHRNHTCNLQQTCYNLQGGFKCIDPIRCEEPYLRISDNRCMCPAENPGCRDQPFTILYRDMDVVSGRSVPADIFQMQATTRYPGAYYIFQIKSGNEGREFYMRQTGPISATLVMTRPIKGPREIQLDLEMITVNTVINFRGSSVIRLRIYVSQYPF

SEQ ID NO: 4804 - protein, 67 aa, Homo sapiens
  SITE (62): Xaa equals any amino acid
FMNMVCLFIIVRSSLIYFSLSSSSTPLSCCPSSSSSFSFPFSYSFIFIFFFLQDQVSFCHPXGVQWC

SEQ ID NO: 4805 - protein, 45 aa, Homo sapiens
NIFITPKRNPIPISSHSLFPSNLPSPNQPLIYFLSIWICLFLTSI

SEQ ID NO: 4806 - protein, 25 aa, Homo sapiens
LAACTFIHCLTVWLCGLTQILLRLT

SEQ ID NO: 4807 - protein, 41 aa, Homo sapiens
  SITE (19): Xaa equals any amino acid
NHQRMQFPYPNDSISLTLXNQWPKFSSPLPPRTPAQNSSEI

SEQ ID NO: 4808 - protein, 4 aa, Homo sapiens
KKRG

SEQ ID NO: 4809 - protein, 127 aa, Homo sapiens
MQQRGLAIVALAVCAALHASEAILPIASSCCTEVSHHISRRLLERVNMCRIQRADGDCDLAAVILHVKRRRICVSPHNHTVKQWMKVQAAKKNGKGNVCHRKKHHGKRNSNRAHQGKHETYGHKTPY

SEQ ID NO: 4810 - protein, 127 aa, Homo sapiens; identical to SEQ ID NO: 4809

SEQ ID NO: 4811 - protein, 127 aa, Homo sapiens; identical to SEQ ID NO: 4809

SEQ ID NO: 4812 - protein, 21 aa, Homo sapiens
MPTPCTSLPSCCQHRSITMTL

SEQ ID NO: 4813 - protein, 347 aa, Homo sapiens
  SITE (2): Xaa equals any amino acid
  SITE (303): Xaa equals any amino acid
  SITE (318): Xaa equals any amino acid
  SITE (319): Xaa equals any amino acid
VXCPWVVLLHLSAALLCSHITATEAAGISQPSPIYSHFSETVTGASVIRAYNRSRDFEIISDTKVDANQRSCYPYIISNRWLSIGVEFVGNCVVLFAALFAVIGRSSLNPGLVGLSVSYSLQVTFALNWMIRMMSDLESNIVAVERVKEYSKTETEAPWVVEGSRPPEGWPPRGEVEFRNYSVRYRPGLDLVLRDLSLHVHGGEKVGIVGRTGAGKSSMTLCLFRILEAAKGEIRIDGLNVADIGLHDLRSQLTIIPQDPILFSGTLRMNLDPFGSYSEEDIWWALELSHLHTFVSSQPAAWXLPVLRGRGESQRGPXXARVPGPSPAPQEPHPGFRRGHSCHRPGD

SEQ ID NO: 4814 - protein, 133 aa, Homo sapiens
  SITE (122): Xaa equals any amino acid
GSAATVGPDEILGGRKKIWISYHPFLNEKLSFNSVKCATENSVYVTLTRDAQNQGVQPSSVFSKEGACLKNCGDHCSVICDSPENLWVHEALPKGNLDTQHILPTGRSSGLVNSDSAQQSLXSPSVSTKLVGC

SEQ ID NO: 4815 - protein, 42 aa, Homo sapiens
LQGNGLDGRLHRAVVRTWSKTSGLLKKLKKQSWNGGGKLDSS

SEQ ID NO: 4816 - protein, 41 aa, Homo sapiens
FLKQNFHHVPWCSQPHRLLLTTACKMKAAILRLAEAGLRYG

SEQ ID NO: 4817 - protein, 350 aa, Homo sapiens
MQRLGATLLCLLLAAAVPTAPAPAPTATSAPVKPGPALSYPQEEATLNEMFREVEELMEDTQHKLRSAVEEMEAEEAAAKASSEVNLANLPPSYHNETNTDTKVGNNTIHVHREIHKITNNQTGQMVFSETVITSVGDEEGRRSHECIIDEDCGPSMYCQFASFQYTCQPCRGQRMLCTRDSECCGDQLCVWGHCTKMATRGSNGTICDNQRDCQPGLCCAFQRGLLFPVCTPLPVEGELCHDPASRLLDLITWELEPDGALDRCPCASGLLCQPHSHSLVYVCKPTFVGSRDQDGEILLPREVPDEYEVGSFMEEVRQELEDLERSLTEEMALGEPAAAAAALLGGEEI

SEQ ID NO: 4818 - protein, 104 aa, Homo sapiens
MQRLGATLLCLLLAAAVPTAPAPAPTATSAPVKPGPALSYPQEEATLNEMFREVEELMEDTQHKLRSAVEEMEAEEAAAKASSEVNLANLPPTFTMETTPNPRV

SEQ ID NO: 4819 - protein, 431 aa, Homo sapiens; identical to SEQ ID NO: 3407

SEQ ID NO: 4820 - protein, 431 aa, Homo sapiens; identical to SEQ ID NO: 3407

SEQ ID NO: 4821 - protein, 6 aa, Homo sapiens
FCFASC

SEQ ID NO: 4822 - protein, 57 aa, Homo sapiens
PPRNSRVDPRVRLSNKSLLVVLFAILLKLGKDNLKQGLKLTEIWRLNLYSILVKSLA

SEQ ID NO: 4823 - protein, 87 aa, Homo sapiens
  SITE (6): Xaa equals any amino acid
  SITE (37): Xaa equals any amino acid
  SITE (52): Xaa equals any amino acid
LTYSPXSLQRIQLSMWLREQLISTVSQFLYYYYTLSXGIHVQNVQRCYIGIXVPWWFAAPINLSSTLGISPNAIPPLAPNLPTGTGV

SEQ ID NO: 4824 - protein, 13 aa, Homo sapiens
TGLCTSVCFCSGW

SEQ ID NO: 4825 - protein, 38 aa, Homo sapiens
LPGPPLEFFFFFFLLSICLVDLPTSLEVKRSRPSWPTW

SEQ ID NO: 4826 - protein, 13 aa, Homo sapiens
TGLCTSVCFCSGW

SEQ ID NO: 4827 - protein, 60 aa, Homo sapiens; identical to SEQ ID NO: 3413

SEQ ID NO: 4828 - protein, 19 aa, Homo sapiens
VCWSMWPGFLAPIKHNAIF

SEQ ID NO: 4829 - protein, 253 aa, Homo sapiens
GLGPGPGAAAAAAAAMAQQQMTSSQKALMLELKSLQEEPVEGFRITLVDESDLYNWEVAIFGPPNTLYEGGYFKAHIKFPIDYPYSPPTFRFLTKMWHPNIYENGDVCISILHPPVDDPQSGELPSERWNPTQNVRTILLSVISLLNEPNTFSPANVDASVMFRKWRDSKGKDKEYAEIIRKQVSATKAEAEKDGVKVPTTLAEYCIKTKVPSNDNSSDLLYDDLYDDDIDDEDEEEEDADCYDDDDSGNEES

SEQ ID NO: 4830 - protein, 79 aa, Homo sapiens
  SITE (4): Xaa equals any amino acid
MTLXCLCLSVTVLHPLRSKERLSGTFCGYSSSWCSPASESSSPGSLLTCAASGSHPDCPLSQRLLGVQLAALGRPQGLF

SEQ ID NO: 4831 - protein, 43 aa, Homo sapiens; identical to SEQ ID NO: 3416

SEQ ID NO: 4832 - protein, 21 aa, Homo sapiens
IISFPSPPLGLRPEKGASNKE

SEQ ID NO: 4833 - protein, 87 aa, Homo sapiens
  SITE (67): Xaa equals any amino acid
MISFSAPPLMLPFSFYFFVFPVARTARKRKPSPEPEGEVGPPKINGEAQPWLSTSTEGLKIPMTPTXSFVSPPPPTASPHSNRTTPP

SEQ ID NO: 4834 - protein, 39 aa, Homo sapiens
MRRRFWGVFNCLCAGAFGALAAASAKLAFGSEVVRDVGD

SEQ ID NO: 4835 - protein, 413 aa, Homo sapiens
  SITE (55): Xaa equals any amino acid
  SITE (70): Xaa equals any amino acid
  SITE (95): Xaa equals any amino acid
  SITE (206): Xaa equals any amino acid
QPHILHSRAVSHHPPVSAFHVSNRKDGFCISGSITAKSRFYGNSLSALLDGKATXTFLNRAEDYTLTMPXAHCKGILYGTMTLELGGKVTIECAXNNFQAQLEFKLKPFFGGSTSINQISGKITSGEEVLASLSGHWDRDVFIKEEGSGSSALFWTPSGEVRRQRLRQHTVPLEEQTELESERLWQHVTRAISKGDQHRATQEKFXLEEAQRQRARERQESLMPWKPQLFHLDPITQEWHYRYEDHSPWDPLKDIAQFEQDGILRTLQQEAVARQTTFLGSPGPRHERSGPDQRLRKASDQPSGHSQATESSGSTPESCPELSDEEQDGDFVPGGESPCPRCRKEARRLQALHEAILSIREAQQELHRHLSAMLSSTARAAQAPTPGLLQSPRSWFLLCVFLACQLFINHILK

SEQ ID NO: 4836 - protein, 28 aa, Homo sapiens
DLFSLLLSLLADCNSGPTQPSLWTAIEK

SEQ ID NO: 4837 - protein, 111 aa, Homo sapiens
  SITE (18): Xaa equals any amino acid
  SITE (26): Xaa equals any amino acid
  SITE (95): Xaa equals any amino acid
MFWPMTLEHGWQLPAEVXLPIPQGTXDLFPASWSLSKNYLRNLWVCGFTGLSVWVLQLLLSAAAGHIFPLTQPFMAHGELRGSGRAELQGCDLGXVGLRCPAQGSQVAHGL

SEQ ID NO: 4838 - protein, 91 aa, Homo sapiens
WPCGSSAGPCCTAAAAEAVGFRTSLPIPRCSVSLLLLLVGHDEAGVQDVLFWLPRAVLWGPSFPLHQILDFTLPHALLPDALHGEHLLADG

SEQ ID NO: 4839 - protein, 234 aa, Homo sapiens
  SITE (2): Xaa equals any amino acid
  SITE (7): Xaa equals any amino acid
NXWIPRXAGIPQKPVFEERYTFEIPFLEAQRRTLLLTVVDFDKFSRHCVIGKVSVPLCEVDLVKGGHWWKALIPSSQNEVELGELLLSLNYLPSAGRLNVDVIRAKQLLQTDVSQGSDPFVKIQLVHGLKLVKTKKTSFLRGTIDPFYNESFSFKVPQEELENASLVFTVFGHNMKSSNDFIGRIVIGQYSSGPSETNHWRRMLNTHRTAVEQWHSLRSRAECDRVSPASLEVT

SEQ ID NO: 4840 - protein, 53 aa, Homo sapiens [sequence omitted]

SEQ ID NO: 4841 - protein, 87 aa, Homo sapiens; identical to SEQ ID NO: 3423

SEQ ID NO: 4842 - protein, 8 aa, Homo sapiens
PISVTALT

SEQ ID NO: 4843 - protein, 38 aa, Homo sapiens; identical to SEQ ID NO: 2989

SEQ ID NO: 4844 - protein, 344 aa, Homo sapiens
AHASGPSFCEAATSASGRGEHRAEGVCSRLREAARRRGRPSLKGKRKRGSASIPERGLGRMKTSAELHEQEKPPSSPRATGPGRLGHARGRGPDALRGGAAGPGRASSGAPRERKMAPHGPGSLTTLVPWAAALLLALGVERALALPEICTQCPGSVQNLSKVAFYCKTTRELMLHARCCLNQKGTILGLDLQNCSLEDPGPNFHQAHTTVIIDLQANPLKGDLANTFRGFTQLQTLILPQHVNCPGGINAWNTITSYIDNQICQGQKNLCNNTGDPEMCPENGSCVPDGPGLLQCVCADGFHGYKCMRQGSFSLLMFFGILGATTLSVSILLWATQRRKAKTS

SEQ ID NO: 4845 - protein, 105 aa, Homo sapiens
IMDRKDWAEKTATASRHRMPQSWAPSLFHTTLGSFLGFRTFSIGFQDFEKCLPILISVDPVMGINLFGRGFLFLKMKFPTFFPGGNQYGQREEEMAILTCVSHVT

SEQ ID NO: 4846 - protein, 2 aa, Homo sapiens
GR

SEQ ID NO: 4847 - protein, 41 aa, Homo sapiens; identical to SEQ ID NO: 3428

SEQ ID NO: 4848 - protein, 6 aa, Homo sapiens
MEWLSS

SEQ ID NO: 4849 - protein, 92 aa, Homo sapiens
MASLGHILVFCVGLLTMAKAESPKEHDPFTYDYQSLQIGGLVIAGILFILGILIVLSRRCRCKFNQQQRTGEPDEEEGTFRSSIRRLSTRRR

SEQ ID NO: 4850 - protein, 92 aa, Homo sapiens; identical to SEQ ID NO: 4849

SEQ ID NO: 4851 - protein, 92 aa, Homo sapiens; identical to SEQ ID NO: 4849

SEQ ID NO: 4852 - protein, 258 aa, Homo sapiens
TQRGSAALARLGELGVGNMAGPPRLLLLPLLLALARGLPGALAAQEVQQSPHCTTVPVGASVNITCSTSGGLRGIYLRQLGPQPQDIIYYEDGVVPTTDRRFRGRIDFSGSQDNLTITMHRLQLSDTGTYTCQAITEVNVYGSGTLVLVTEEQSQGWHRCSDAPPRASALPAPPTGSALPDPQTASALPDPPAASALPAALAVISFLLGLGLGVACVLARTQIKKLCSWRDKNSAACVVYEDMSHSRCNTLSSPNQYQ

SEQ ID NO: 4853 - protein, 138 aa, Homo sapiens
HYRRYACRYRSGIPGSTHASGPTRPPTRPVLAMTSGQMWNHIRGPPYAHKNPHTGHVNYIHGSSQAQFVAETHIVLLFNGGVTLGMVLLCEAATSDMDIGKRKIMCVAGIGLVVLFFSWMLSIFRSKYHGYPYSFLMS

SEQ ID NO: 4854 - protein, 148 aa, Homo sapiens
  SITE (21): Xaa equals any amino acid
  SITE (22): Xaa equals any amino acid
PWWWRCSSFATFPQPLPKERXXMEFLFNKTGWAFAALCFVLAMTSGQMWNHIRGPPYAHKNPHTGHVNYIHGSSQAQFVAETHIVLLFNGGVTLGMVLLCEAATSDMDIGKRKIMCVAGIGLVVLFFSWMLSIFRSKYHGYPYSFLMS

SEQ ID NO: 4855 - protein, 349 aa, Homo sapiens
MNSTLDGNQSSHPFCLLAFGYLETVNFCLLEVLIIVFLTVLIISGNIIVIFVFHCAPLLNHHTTSYFIQTMAYADLFVGVSCVVPSLSLLHHPLPVEESLTCQIFGFVVSVLKSVSMASLACISIDRYIAITKPLTYNTLVTPWRLRLCIFLIWLYSTLVFLPSFFHWGKPGYHGDVFQWCAESWHTDSYFTLFIVMMLYAPAALIVCFTYFNIFRICQQHTKDISERQARFSSQSGETGEVQACPDKRYAMVLFRITSVFYILWLPYIIYFLLESSTGHSNRFASFLTTWLAISNSFCNCVIYSLSNSVFQRGLKRLSGAMCTSCASQTTANDPYTVRSKGPLNGCHI

SEQ ID NO: 4856 - protein, 38 aa, Homo sapiens
MLSPFLLSAVQRRLITTPAEAPNLLPFSSTLSPYPHLA

SEQ ID NO: 4857 - protein, 90 aa, Homo sapiens; identical to SEQ ID NO: 3434

SEQ ID NO: 4858 - protein, 14 aa, Homo sapiens
HLVMARVLFMYVKM

SEQ ID NO: 4859 - protein, 56 aa, Homo sapiens
  SITE (6): Xaa equals any amino acid
  SITE (7): Xaa equals any amino acid
RPLAVXXWPPNMKVSASALISSSDNAFPSSSLLSRSTSMKSKVLDLALSLKKSSIP

SEQ ID NO: 4860 - protein, 66 aa, Homo sapiens
DNNYGSESRVWLWKIWENGNGFHFNPKAMGSHNKWLSRGGAGHIWAPERSFQSYYGERTSCRMKSQ

SEQ ID NO: 4861 - protein, 110 aa, Homo sapiens
TCSVNEFSLHSFLVYSELSYFFQTSLLPECLLFCSLIPTLRSSPGSPKGDLGVKVIYLLSRTPASFIHSVFIQQTLPHAFPLPVLFPHLSVLWRPGKNPAYGCVFQVLPA

SEQ ID NO: 4862 - protein, 107 aa, Homo sapiens; identical to SEQ ID NO: 3437

SEQ ID NO: 4863 - protein, 107 aa, Homo sapiens; identical to SEQ ID NO: 3437

SEQ ID NO: 4864 - protein, 5 aa, Homo sapiens
KWSEL

SEQ ID NO: 4865 - protein, 10 aa, Homo sapiens
WAWVVFPRGI

SEQ ID NO: 4866 - protein, 60 aa, Homo sapiens
  SITE (45): Xaa equals any amino acid
  SITE (56): Xaa equals any amino acid
  SITE (60): Xaa equals any amino acid
MTQLLTVSFFVLGCLVCPLSSCTVEVGICPTARTLRSHSLSHSMXSCASTAELLMXPWTX

SEQ ID NO: 4867 - protein, 85 aa, Homo sapiens; identical to SEQ ID NO: 3439

SEQ ID NO: 4868 - protein, 139 aa, Homo sapiens
NMLVLMTLFLLLYYRYVYGFGVCVYVHIYAHIYTHTHIYNQLSIAYSSLIIYILYSNFSNTPTKSFSPPYQYYNVPDNNITNPALTPTDFFENKQLLHAISFLYSPTGFLQPPAHPVQLRTSTTLYGNHRGQTGCSQLD

SEQ ID NO: 4869 - protein, 90 aa, Homo sapiens; identical to SEQ ID NO: 3440

SEQ ID NO: 4870 - protein, 241 aa, Homo sapiens; identical to SEQ ID NO: 3442

SEQ ID NO: 4871 - protein, 116 aa, Homo sapiens
  SITE (18): Xaa equals any amino acid
  SITE (28): Xaa equals any amino acid
  SITE (34): Xaa equals any amino acid
  SITE (104): Xaa equals any amino acid
MLDTLVFSSLLLFGFAEXKQLLEVELYXDYRENXYVPTTGAIIEIHSKRIQLYGSLPPHPRALHWGSDTCYYNFPMTCAFIGVCQQLSPSSASSCSFSYMQWGXGGEFWARKPFFF

SEQ ID NO: 4872 - protein, 241 aa, Homo sapiens; identical to SEQ ID NO: 3442

SEQ ID NO: 4873 - protein, 160 aa, Homo sapiens
DPAAPSVMAAGLFGLSARRLLAAAATRGLPAARVRWESSFSRTVVAPSAVAGKRPPEPTTPWQEDPEPEDENLYEKNPDSHGYDKDPVLDVWNMRLVFFFGVSIILVLGSTFVAYLPDYRMKEWSRREAERLVKYREANGLPIMESNCFDPSKIQLPEDE

SEQ ID NO: 4874 - protein, 299 aa, Homo sapiens
MSSNKEQRSAVFVILFALITILILYSSNSANEVFHYGSLRGRSRRPVNLKKWSITDGYVPILGNKTLPSRCHQCVIVSSSSHLLGTKLGPEIERAECTIRMNDAPTTGYSADVGNKTTYRVVAHSSVFRVLRRPQEFVNRTPETVFIFWGPPSKMQKPQGSLVRVIQRAGLVFPNMEAYAVSPGRMRQFDDLFRGETGKDREKSHSWLSTGWFTMVIAVELCDHVHVYGMVPPNYCSQRPRLQRMPYHYYEPKGPDECVTYIQNEHSRKGNHHRFITEKRVFSSWAQLYGITFSHPSWT

SEQ ID NO: 4875 - protein, 95 aa, Homo sapiens
  SITE (73): Xaa equals any amino acid
  SITE (80): Xaa equals any amino acid
  SITE (83): Xaa equals any amino acid
  SITE (89): Xaa equals any amino acid
  SITE (93): Xaa equals any amino acid
MSSNKEQRSAVFVILFALITILILYSSNSANEVFHYGSLRGRSRRPVNLKKWSITDGYVPILRQQDTALSVPXVCDCQQXQPXAGHQAXALRXSG

SEQ ID NO: 4876 - protein, 130 aa, Homo sapiens
MSSNKEQRSAVFVILFALITILILYSSNSANEVFHYGSLRGRSRRPVNLKKWSITDGYVPILGNKTLPSRCHQCVIVSSSSHLLGTKLGPEIERAECTIRMNDAPPLATQLMWATRPPTASWPIPVCSAC

SEQ ID NO: 4877 - protein, 320 aa, Homo sapiens
MSSNKEQRSAVFVILFALITILILYSSNSANEVFHYGSLRGRSRRPVNLKKWSITDGYVPILGNKTLPSRCHQCVIVSSSSHLLGTKLGPEIERAECTIRMNDAPTTGYSADVGNKTTYRVVAHSSVFRVLRRPQEFVNRTPETVFIFWGPPSKMQKPQGSLVRVIQRAGLVFPNMEAYAVSPGRMRQFDDLFRGETGKDREKSHSWLSTGWFTMVIAVELCDHVHVYGMVPPNYCSQRPRLQRMPYHYYEPKGPDECVTYIQNEHSRKGNHHRFITEKRVFSSWAQLYGITFSHPFLDLGHPACGTSGGSEEKQPPPSR

SEQ ID NO: 4878 - protein, 299 aa, Homo sapiens
  SITE (269): Xaa equals any amino acid
MQGVKERFLPLGNSGDRAPRPPDGRGRVRPRTQDGVGNHTMARIPKTLKFVVVIVAVLLPVLAYSATTARQEEVPQQTVAPQQQRHSFKGEECPAGSHRSEHTGACNPCTEGVDYTNASNNEPSCFPCTVCKSDQKHKSSCTMTRDTVCQCKEGTFRNENSPEMCRKCSRCPSGEVQVSNCTSWDDIQCVEEFGANATVETPAAEETMNTSPGTPAPAAEETMNTSPGTPAPAAEETMTTSPGTPAPAAEETMTTSPGTPAPAAEETMXTSPGTPASSHYLSCTIVGIIVLIVLLIVFV

SEQ ID NO: 4879 - protein, 152 aa, Homo sapiens
  SITE (67): Xaa equals any amino acid
MRSGRGIYSALVRAEHRDFPRVGFYSSSPSHPPSSGCPLIARPHSVPSPRAPCPVSQPPASPAPHCXLGGRCCMGPSPPAQETASFPGGGGGPERVHRVLFRRRSCPSRVPGAEDNARNETLSNRYLQPTQVSEQEIQGQELAEITGVTVEL

SEQ ID NO: 4880 - protein, 111 aa, Homo sapiens; identical to SEQ ID NO: 3455

SEQ ID NO: 4881 - protein, 18 aa, Homo sapiens
LVVGGAWLPPRLGGRDWL

SEQ ID NO: 4882 - protein, 129 aa, Homo sapiens
MARGSLRRLLRLLVLGLWLALLRSVAGEQAPGTAPCSRGSSWSADLDKCMDCASCRARPHSDFCLGCAAAPPAPFRLLWPILGGALSLTFVLGLLSGFLVWRRCRRREKFTTPIEETGGEGCPAVALIQ

SEQ ID NO: 4883 - protein, 94 aa, Homo sapiens
MARGSLRRLLRLLVLGLWLALLRSVAGEQAPGAAAPPAPFRLLWPILGGALSLTFVLGLLSGFLVWRRCRRREKFTTPIEETGGEGCPAVALIQ

SEQ ID NO: 4884 - protein, 94 aa, Homo sapiens; identical to SEQ ID NO: 4883

SEQ ID NO: 4885 - protein, 20 aa, Homo sapiens
INDGRNKKKKKKKKKKKKGG

SEQ ID NO: 4886 - protein, 137 aa, Homo sapiens
MGFGATLAVGLTIFVLSVVTIIICFTCSCCCLYKTCRRPRPVVTTTTSTTVVHAPYPQPPSVPPSYPGPSYQGYHTMPPQPGMPAAPYPMQYPPPYPAQPMGPPAYHETLAGGAAAPYPASQPPYNPAYMDAPKAAL

SEQ ID NO: 4887 - protein, 25 aa, Homo sapiens
  SITE (14): Xaa equals any amino acid
KSKKKKKGRPHKRXPRGAKETRACD

SEQ ID NO: 4888 - protein, 137 aa, Homo sapiens; identical to SEQ ID NO: 4886

SEQ ID NO: 4889 - protein, 156 aa, Homo sapiens
MGFGATLAVGLTIFVLSVVTIIICFTCSCCCLYKHVPPTTSGCHHHHIHHCGACPLSSASKCAAQLPWTKLPGLPHHAASARDASSTLPNAVPTTLPSPAHGPTGPTTRPWLGEQPRPTPPASLLTTPAYMDAPEGGPLSIPWALLAATWLCCLCA

SEQ ID NO: 4890 - protein, 137 aa, Homo sapiens; identical to SEQ ID NO: 4886

SEQ ID NO: 4891 - protein, 39 aa, Homo sapiens
IALIDGFSPFDVGVHVLNSGLLFQTGTTLNPISVYSFDL

SEQ ID NO: 4892 - protein, 306 aa, Homo sapiens
MVLEEIWTSLFMWFFYALIPCLLTDEVAILPAPQNLSVLSTNMKHLLMWSPVIAPGETVYYSVEYQGEYESLYTSHIWIPSSWCSLTEGPECDVTDDITATVPYNLRVRATLGSQTSAWSILKHPFNRNSTILTRPGMEITKDGFHLVIELEDLGPQFEFLVAYWRREPGAEEHVKMVRSGGIPVHLETMEPGAAYCVKAQTFVKAIGRYSAFSQTECVEVQGEAIPLVLALFAFVGFMLILVVVPLFVWKMGRLLQYSCCPVVVLPDTLKITNSPQKLISCRREEVDACATAVMSPEELLRAWIS

SEQ ID NO: 4893 - protein, 306 aa, Homo sapiens; identical to SEQ ID NO: 4892

SEQ ID NO: 4894 - protein, 39 aa, Homo sapiens
  SITE (34): Xaa equals any amino acid
  SITE (35): Xaa equals any amino acid
MAARWRFWCVSVTMVVALLIVCDVPSASAQRKKXXGISL

SEQ ID NO: 4895 - protein, 69 aa, Homo sapiens
PQKKYFMWVFCFSLLDFMDEGIWLTFYFLMEQPVFVNYSLVNCEILNSLPAILVLVSGQIYAVVLMRLV

SEQ ID NO: 4896 - protein, 115 aa, Homo sapiens
MAVLAPLIALVYSVPRLSRWLAQPYYLLSALLSAAFLLVRKLPPLCHGLPTQREDGNPCDFDWREVEILMFLSAIVMMKNRRSMPHEEGQRMGYRSAQPSLTCDISVFQSLWSNI

SEQ ID NO: 4897 - protein, 192 aa, Homo sapiens
  SITE (173): Xaa equals any amino acid
  SITE (179): Xaa equals any amino acid
MAVLAPLIALVYSVPRLSRWLAQPYYLLSALLSAAFLLVRKLPPLCHGLPTQREDGNPCDFDWREVEILMFLSAIVMMKNRRSMFLMTCKPPLYMGPEYIKYFNDKTIDEELERDKRVTWIVEFFANWSNDCQSFAPIYADLSLKYNCTGLNFGKVDVGRYTDVSTRYKVSTXPLNQAXPYPDLFQGGKGGN

SEQ ID NO: 4898 - protein, 258 aa, Homo sapiens; identical to SEQ ID NO: 3467

SEQ ID NO: 4899 - protein, 246 aa, Homo sapiens
MAAAAATKILLCLPLLLLLSGWSRAGRADPHSLCYDITVIPKFRPGPRWCAVQGQVDEKTFLHYDCGNKTVTPVSPLGKKLNVTTAWKAQNPVLREVVDILTEQLRDIQLENYTPKEPLTLQARMSCEQKAEGHSSGSWQFSFDGQIFLLFDSEKRMWTTVHPGARKMKEKWENDKVVAMSFHYFSMGDCIGWLEDFLMGMDSTLEPSAGAPLAMSSGTTQLRATATTLILCCLLIILPCFILPGI

SEQ ID NO: 4900 - protein, 165 aa, Homo sapiens
  SITE (154): Xaa equals any amino acid
  SITE (155): Xaa equals any amino acid
MAAAAIPALLLCLPLLFLLFGWSRARRDDPHSLCYDITVIPKFRPGPRWCAVQGQVDEKTFLHYDCGNKTVTPVSPLGKKLNVTMAWKAQNPVLREVVDILTEQLLDIQLENYTPKEPLTLQARMSCEQKAEGHSSGSWQFSIDGQTFLLFDSXXRMWTNGSSWR

SEQ ID NO: 4901 - protein, 246 aa, Homo sapiens; identical to SEQ ID NO: 4899

SEQ ID NO: 4902 - protein, 35 aa, Homo sapiens; identical to SEQ ID NO: 3461

SEQ ID NO: 4903 - protein, 79 aa, Homo sapiens; identical to SEQ ID NO: 3272

SEQ ID NO: 4904 - protein, 79 aa, Homo sapiens; identical to SEQ ID NO: 3272

SEQ ID NO: 4905 - protein, 419 aa, Homo sapiens
RDIWTMNLQRYWGEIPISSSQTNRSSFDLLPREFRLVEVHDPPLHQPSANKPKPPTMLDIPSEPCSLTIHTIQLIQHNRRLRNLIATAQAQNQQQTEGVKTEESEPLPSCPGSPPLPDDLLPLDCKNPNAPFQIRHSDPESDFYRGKGEPVTELSWHSCRQLLYQAVATILAHAGFDCANESVLETLTDVAHEYCLKFTKLLRFAVDREARLGQTPFPDVMEQVFHEVGIGSVLSLQKFWQHRIKDYHSYMLQISKQLSEEYERIVNPEKATEDAKPVKIKEEPVSDITFPVSEELEADLASGDQSLPMGVLGAQSERFPSNLEVEASPQASSAEVNASPLWNLAHVKMEPQESEEGNVSGHGVLGSDVFEEPMSGMSEAGIPQSPDDSDSSYGSHSTDSLMGSSPVFNQRCKKRMRKI

SEQ ID NO: 4906 - protein, 207 aa, Homo sapiens; identical to SEQ ID NO: 3475

SEQ ID NO: 4907 - protein, 305 aa, Homo sapiens
MGRPRPRAAKTWMFLLLLGGAWAACGSLDLLTKLYAENLPCVHLNPQWPSQPSHCPRGWRSNPLPPAAGHSRAQEDKVLGGHECQPHSQPWQAALFQGQQLLCGGVLVGGNWVLTAAHCKKPKYTVRLGDHSLQNKDGPEQEIPVVQSIPHPCYNSSDVEDHNHDLMLLQLRDQASLGSKVKPISLADHCTQPGQKCTVSGWGTVTSPRENFPDTLNCAEVKIFPQKKCEDAYPGQITDGMVCAGSSKGADTCQGDSGGPLVCDGALQGITSWGSDPCGRSDKPGVYTNICRYLDWIKKIIGSKG

SEQ ID NO: 4908 - protein, 11 aa, Homo sapiens
LGPSSPRTQQS

SEQ ID NO: 4909 - protein, 210 aa, Homo sapiens
  SITE (178): Xaa equals any amino acid
  SITE (179): Xaa equals any amino acid
  SITE (181): Xaa equals any amino acid
  SITE (182): Xaa equals any amino acid
  SITE (186): Xaa equals any amino acid
  SITE (187): Xaa equals any amino acid
  SITE (188): Xaa equals any amino acid
  SITE (207): Xaa equals any amino acid
MGRPRPRAAKTWMFLLLLGGAWAGHSRAQEDKVLGGHECQPHSQPWQAALFQGQQLLCGGVLVGGNWVLTAAHCKKPKYTVRLGDHSLQNKDGPEQEIPVVQSIPHPCYNSSDVEDHNHDLMLLQLRDQASLGSKVKPISLADHCTQPGRSAPSQAGALSPVPERQGFAMLTKAWSRXXLXXSGSXXXWALPKMAWGITKPLEAQPXPLG

SEQ ID NO: 4910 - protein, 305 aa, Homo sapiens; identical to SEQ ID NO: 4907

SEQ ID NO: 4911 - protein, 207 aa, Homo sapiens; identical to SEQ ID NO: 3476

SEQ ID NO: 4912 - protein, 47 aa, Homo sapiens; identical to SEQ ID NO: 3479

SEQ ID NO: 4913 - protein, 28 aa, Homo sapiens
  SITE (11): Xaa equals any amino acid
MFPRKFWLHIXHGYLVYLTACLALCWIL

SEQ ID NO: 4914 - protein, 63 aa, Homo sapiens
MIWTRVSILKPPPKPLCLKPLPPTTWGSTVTNSAADEASLGALLATGSWLSRRPGLSLSGSGA

SEQ ID NO: 4915 - protein, 86 aa, Homo sapiens [sequence omitted]

SEQ ID NO: 4916 - protein, 19 aa, Homo sapiens
  SITE (8): Xaa equals any amino acid
SFFFFLHXFLGLMEFTSLL

SEQ ID NO: 4917 - protein, 86 aa, Homo sapiens [sequence omitted]

SEQ ID NO: 4918 - protein, 41 aa, Homo sapiens; identical to SEQ ID NO: 3483

SEQ ID NO: 4919 - protein, 58 aa, Homo sapiens; identical to SEQ ID NO: 3484

SEQ ID NO: 4920 - protein, 26 aa, Homo sapiens
LDSLVWVQKTSKSLFEAISPELLPVC

SEQ ID NO: 4921 - protein, 40 aa, Homo sapiens; identical to SEQ ID NO: 3485

SEQ ID NO: 4922 - protein, 32 aa, Homo sapiens
FLYFFFLVIFCCCCLYCFSFLIEYGHFWGKNM

SEQ ID NO: 4923 - protein, 139 aa, Homo sapiens
GTSEKELYEALVKVINNPSYRQRAQKLSEIHKDQPGHPVNRTIYWIDYIIRHNGAHHLRAAVHQISFCQYFLLDIAFVLLLGAALLYFLLSWVTKFIYRKIKSLWSRNKHSTVNGHYHNGILNGKYKRNGHIKHEKKVK

SEQ ID NO: 4924 - protein, 118 aa, Homo sapiens
GSWGRGPPQEERKARPQARLWATCPGSRCVQSQLRALPTPPSRRWCSFCLMGPVQLPAALARGWSEHFLLSGLLWELSSGTAGPAHVSVKSGYVALVSRPSASWQGKQRAGKSLKSAA

SEQ ID NO: 4925 - protein, 180 aa, Homo sapiens; identical to SEQ ID NO: 3487

SEQ ID NO: 4926 - protein, 82 aa, Homo sapiens
SQMDQVIQGLVERLENDTLLVVAGDHGMTTNGDHGGDSELEVSAALFLYSPTAVFPSTPPEEPEVIPQVSLVPTAPALAFPV

SEQ ID NO: 4927 - protein, 14 aa, Homo sapiens
WVLKLKILLFTLVR

SEQ ID NO: 4928 - protein, 52 aa, Homo sapiens
LLRSAQVHTHLQGLQCEAGCRNVGTSGQLPEKGLEIRRKPASLAVTSLEEET

SEQ ID NO: 4929 - protein, 495 aa, Homo sapiens [sequence omitted]

SEQ ID NO: 4930 - protein, 85 aa, Homo sapiens
LKIFATGSTFKLYISSEAHWAFGEWFFTGVESQVYCWLHHLLSGMQKHFSSGETEGKVLLQCTCFLCVVFKGNKHVPKDAVKINI

SEQ ID NO: 4931 - protein, 30 aa, Homo sapiens
  SITE (5): Xaa equals any amino acid
  SITE (7): Xaa equals any amino acid
  SITE (14): Xaa equals any amino acid
  SITE (20): Xaa equals any amino acid
  SITE (22): Xaa equals any amino acid
  SITE (30): Xaa equals any amino acid
HLGSXEXLCPAAHXLRCGEXLXPAATPSGX

SEQ ID NO: 4932 - protein, 43 aa, Homo sapiens; identical to SEQ ID NO: 3493

SEQ ID NO: 4933 - protein, 77 aa, Homo sapiens
GRCKMCFVKQMLEGSMLLKSHHHSLISSTQGHKHCGRPQGPLPRKTGDLCSLVYVLTFPALLSYDPAKSPSARNTQE

SEQ ID NO: 4934 - protein, 283 aa, Homo sapiens; identical to SEQ ID NO: 4380

SEQ ID NO: 4935 - protein, 236 aa, Homo sapiens
  SITE (214): Xaa equals any amino acid
  SITE (215): Xaa equals any amino acid
MKILILGIFLFLCSTPAWAKEKHYYIGIIETTWDYASDHGEKKLISVDTEHSNIYLQNGPDRIGRLYKKALYLQYTDETFRTTIEKPVWLGFLGPIIKAETGDKVYVHLKNLASRPYTFHSHGITYYKEHEGAIYPDNTTDFQRADDKVYPGEQYTYMLLATEEQSPGEGDGNCVTRIYHSHIDAPKDIASGLIGPLIICKKDSLDKEKEKHIXXEWTVPKEVGPTNADPVCLAKM

SEQ ID NO: 4936 - protein, 80 aa, Homo sapiens; identical to SEQ ID NO: 3370

SEQ ID NO: 4937 - protein, 54 aa, Homo sapiens; identical to SEQ ID NO: 3499

SEQ ID NO: 4938 - protein, 2 aa, Homo sapiens
LC

SEQ ID NO: 4939 - protein, 92 aa, Homo sapiens
  SITE (76): Xaa equals any amino acid
MVMGLGVLLLVFVLGLGLTPPTLAQDNSRYTHFLTQHYDAKPQGRDDRYCESIMRRRGLTSPCKDINTFIHGNKRXSRPSVKTRMETLTEKT

SEQ ID NO: 4940 - protein, 151 aa, Homo sapiens; identical to SEQ ID NO: 3507

SEQ ID NO: 4941 - protein, 46 aa, Homo sapiens; identical to SEQ ID NO: 3508

SEQ ID NO: 4942 - protein, 429 aa, Homo sapiens; identical to SEQ ID NO: 3509

SEQ ID NO: 4943 - protein, 429 aa, Homo sapiens; identical to SEQ ID NO: 3509

SEQ ID NO: 4944 - protein, 183 aa, Homo sapiens
MKLLSLVAVVGCLLVPPAEANKSSEDIRCKCICPPYRNISGHIYNQNVSQKDCNCLHVVEPMPVPGHDVEAYCLLCECRYEERSTTTIKVIIVIYLSVVGALLLYMAFLMLVDPLIRKPDAYTEQLHNEEENEDARSMAAAAASLGGPRANTVLERVEGAQQRWKLQVQEQRKTVFDRHKMLS

SEQ ID NO: 4945 - protein, 108 aa, Homo sapiens; identical to SEQ ID NO: 3510

SEQ ID NO: 4946 - protein, 45 aa, Homo sapiens; identical to SEQ ID NO: 3512

SEQ ID NO: 4947 - protein, 45 aa, Homo sapiens; identical to SEQ ID NO: 3512

SEQ ID NO: 4948 - protein, 117 aa, Homo sapiens
  SITE (52): Xaa equals any amino acid
MGLLCLRYHLNLSPQRVQGTPELSQPNPGPPKLQLHDVFIAVKTTRAFHRLXLELLLDTWVSRTREQTFVFTDSPDKGLQERLGSHLVVTNCSAEHSHPALSCKMAAEFDTWRPCSC

SEQ ID NO: 4949 - protein, 673 aa, Homo sapiens
PRPGTAPVRKCSGVRGEQEREAADRPARGTMLNMWKVRELVDKATNVVMNYSEIESKVREATNDDPWGPSGQLMGEIAKATFMYEQFPELMNMLWSRMLKDNKKNWRRVYKSLLLLAYLIRNGSERVVTSAREHIYDLRSLENYHFVDEHGKDQGINIRQKVKELVEFAQDDDRLREERKKAKKNKDKYVGVSSDSVGGFRYSERYDPEPKSKWDEEWDKNKSAFPFSDKLGELSDKIGSTIDDTISKFRRKDREDSPERCSDSDEEKKARRGRSPKGEFKDEEETVTTKHIHITQATETTTTRHKRTANPSKTIDLGAAAHYTGDKASPDQNASTHTPQSSVKTSVPSSKSSGDLVDLFDGTSQSTGGSADLFGGFADFGSAAASGSFPSQVTATSGNGDFGDWSAFNQAPSGPVASSGEFFGSASQPAVELVSGSQSALGPPPAASNSSDLFDLMGSSQATMTSSQSMNFSMMSTNTVGLGLPMSRSQPLQNVSTVLQKPNPLYNQNTDMVQKSVSKTLPSTWSDPSVNISLDNLLPGMQPSKPQQPSLNTMIQQQNMQQPMNVMTQSFGAVNLSSPSNMLPVRPQTNALIGGPMPMSMPNVMTGTMGMAPLGNTPMMNQSMMGMNMNIGMSAAGMGLTGTMGMGMPNIAMTSGTVQPKQDAFANFANFSK

SEQ ID NO: 4950 - protein, 31 aa, Homo sapiens; identical to SEQ ID NO: 3515

SEQ ID NO: 4951 - protein, 199 aa, Homo sapiens; identical to SEQ ID NO: 3265

SEQ ID NO: 4952 - protein, 21 aa, Homo sapiens
  SITE (9): Xaa equals any amino acid
MQLCWVIWXSSCSEATTPSPQ

SEQ ID NO: 4953 - protein, 199 aa, Homo sapiens; identical to SEQ ID NO: 3265

SEQ ID NO: 4954 - protein, 203 aa, Homo sapiens
  SITE (1): Xaa equals any amino acid
  SITE (10): Xaa equals any amino acid
  SITE (17): Xaa equals any amino acid
XREQKLEFNXVGGRSRXSGSPGLQEFGTSRRLDPESHPAKRAGPGQARTPAASPFPGSAPSAPSGSRAHDAAGPWLAAAALPRLALLPGLGARALPLWPARLLLQAQQLQAHPGQPAAVPRHRIPEHAAAQPAGPRDHERARLTISAPGSQLPFPKHTPSCSSLSLGSFPLPFARLHPQHFLSYKATGVDSCFHLKEKPTRIL

SEQ ID NO: 4955 - protein, 295 aa, Homo sapiens; identical to SEQ ID NO: 3206

SEQ ID NO: 4956 - protein, 8 aa, Homo sapiens
QSSKLWIF

SEQ ID NO: 4957 - protein, 58 aa, Homo sapiens; identical to SEQ ID NO: 3519

SEQ ID NO: 4958 - protein, 519 aa, Homo sapiens
  SITE (225): Xaa equals any amino acid
MQGGQRPHLLLLLLAVCLGAQSRNQEERLLADLMRNYDPHLRPAERDSDVVNVSLKLTLTNLISLNEREEALTTNVWIEMQWCDYRLRWDPKDYEGLWILRVPSTMVWRPDIVLENNVDGVFEVALYCNVLVSPDGCIYWLPPAIFRSSCSISVTYFPFDWQNCSLIFQSQTYSTSEINLQLSQEDGQAIEWIFIDPEAFTENGEWAIRHRPAKMLLDSVAPAEXAGHQKVVFYLLIQRKPLFYVINIIAPCVLISSVAILIYFLPAKAGGQKCTVATNVLLAQTVFLFLVAKKVPETSQAVPLISKYLTFLMVVTILIVVNSVVVLNVSLRSPHTHSMARGVRKVFLRLLPQLLRMHVRPLAPAAVQDARFRLQNGSSSGWPIMAREEGDLCLPRSELLFRQRQRNGLVQAVLEKLENGPEVRQSQEFCGSLKQASPAIQACVDACNLMARARRQQSHFDSGNEEWLLVGRVLDRVCFLAMLSLFICGTAGIFLMAHYNQVPDLPFPGDPRPYLPLPD

SEQ ID NO: 4959 - protein, 111 aa, Homo sapiens; identical to SEQ ID NO: 4837
  SITE (18): Xaa equals any amino acid
  SITE (26): Xaa equals any amino acid
  SITE (95): Xaa equals any amino acid

SEQ ID NO: 4960 - protein, 142 aa, Homo sapiens
  SITE (59): Xaa equals any amino acid
  SITE (111): Xaa equals any amino acid
  SITE (115): Xaa equals any amino acid
  SITE (117): Xaa equals any amino acid
IPGSTHASVHWESRMGALARALPSILLALLLTSTPEALGANPGLVARITDKGLQYAAQXGLLALQSELLRITLPDFTGDLRIPHVGRGRYEFHSLNIHSCELLHSALRLSXARAXSXHLRLLHPGPRQVESAQVILQTTRLL

SEQ ID NO: 4961 - protein, 70 aa, Homo sapiens; identical to SEQ ID NO: 3378

SEQ ID NO: 4962 - protein, 70 aa, Homo sapiens; identical to SEQ ID NO: 3378

SEQ ID NO: 4963 - protein, 60 aa, Homo sapiens; identical to SEQ ID NO: 3525

SEQ ID NO: 4964 - protein, 60 aa, Homo sapiens; identical to SEQ ID NO: 3525

SEQ ID NO: 4965 - protein, 60 aa, Homo sapiens; identical to SEQ ID NO: 3525

SEQ ID NO: 4966 - protein, 108 aa, Homo sapiens
  SITE (6): Xaa equals any amino acid
RTTFHXNPSTSFQLLHYCHSPGYCHLSADDGNSSLWACSACPPAALQVILHIVARMIFSELKSHHVTPFKNTVGLTPVIPALWEAKVGRLRGQEIETILANTVKPHLY

SEQ ID NO: 4967 - protein, 20 aa, Homo sapiens
PLLTSLRWPSLLQMGGPRTR

SEQ ID NO: 4968 - protein, 128 aa, Homo sapiens
  SITE (96): Xaa equals any amino acid
  SITE (106): Xaa equals any amino acid
MPRPAPARRLPGLLLLLWPLLLLPSAAPDPVARPGFRRLETRGPGGSPGRRPSPAAPDGAPASGTSEPGRARGAGVCKSRPLDLVFIIDSSRSVRXLEFTKVKTFXSRIIDTLDIGPSRHAGGSGELC

SEQ ID NO: 4969 - protein, 71 aa, Homo sapiens
KCGQLGVLNTHAFFCTPVIANVPANNLPLSVLMLEYYWINCMKIFCRISMILPRKYICRYLLRANFSVSKL

SEQ ID NO: 4970 - protein, 48 aa, Homo sapiens
MRCAGTHPGRSVALPASSARPSAPPRPSPSRLSQELMAAAGPPAMTST

SEQ ID NO: 4971 - protein, 199 aa, Homo sapiens
ALAQAARAGPPGGRSLHSSAVAATYKYVNMQDPEMDMKSVTDRAARTLLWTELFRGLGMTLSYLFREPATINYPFEKGPLSPRFRGEHALRRYPSGEERCIACKLCEAICPAQAITIEAEPRADGSRRTTRYDIDMTKCIYCGFCQEACPVDAIVEGPNFEFSTETHEELLYNKEKLLNNGDKWEAEIAANIQADYLYR

SEQ ID NO: 4972 - protein, 136 aa, Homo sapiens; identical to SEQ ID NO: 3531

SEQ ID NO: 4973 - protein, 67 aa, Homo sapiens
  SITE (6): Xaa equals any amino acid
  SITE (9): Xaa equals any amino acid
  SITE (10): Xaa equals any amino acid
  SITE (42): Xaa equals any amino acid
  SITE (44): Xaa equals any amino acid
KLRVPXEIXXQLCPCPRPMFACVFEPEGARPPNYLCQHACIXRXIISSDVSERSLRTERKPPPSYCV

SEQ ID NO: 4974 - protein, 92 aa, Homo sapiens
MIHLGHILFLLLLPVAAAQTTPGERSSLPAFYPGTSGSCSGCGSLSLPLLAGLVAADAVASLLIVGAVFLCARPRRSPAQDGKVYINMPGRG

SEQ ID NO: 4975 - protein, 68 aa, Homo sapiens
  SITE (12): Xaa equals any amino acid
KIFFHRRRGPLXTRLSRLLLDLTLKLDFCSIIYDLLVGYSARLGSLPLLSLPCAQLTLPTMNRPLGYA

SEQ ID NO: 4976 - protein, 28 aa, Homo sapiens
GLCLCQILPHLVSHSSAGITAQVSGHVG

SEQ ID NO: 4977 - protein, 48 aa, Homo sapiens
  SITE (28): Xaa equals any amino acid
  SITE (41): Xaa equals any amino acid
MPSMSSLLWRWVSPWLGSCQNCTPLLSXATSYGFENGPSEXLHKAQDL

SEQ ID NO: 4978 - protein, 6 aa, Homo sapiens
PSQASA

SEQ ID NO: 4979 - protein, 28 aa, Homo sapiens
GLCLCQILPHLVSHSSAGITAQVSGHVG

SEQ ID NO: 4980 - protein, 28 aa, Homo sapiens
GLCLCQILPHLVSHSSAGITAQVSGHVG

SEQ ID NO: 4981 - protein, 62 aa, Homo sapiens
  SITE (48): Xaa equals any amino acid
MLAFMCVLVVLLTTCQAILSTFKTGARGKVKCQGLLLLFQENDRLGAXAHACNPPKVLVLQA

SEQ ID NO: 4982 - protein, 65 aa, Homo sapiens
  SITE (22): Xaa equals any amino acid
LELVDPPAAGIRHEVGSVGSQXRSGLWSRTLCSMLAFMCVLVVLLTTCQAILSTFKTGARGKVKC

SEQ ID NO: 4983 - protein, 57 aa, Homo sapiens [sequence omitted]

SEQ ID NO: 4984 - protein, 55 aa, Homo sapiens
MSLFNPLSLFSTIITPAHAPFISCLDFYSDFLIGCFYSSLKPSHPSFTLLPEVSL

SEQ ID NO: 4985 - protein, 75 aa, Homo sapiens; identical to SEQ ID NO: 3539

SEQ ID NO: 4986 - protein, 75 aa, Homo sapiens; identical to SEQ ID NO: 3539

SEQ ID NO: 4987 - protein, 411 aa, Homo sapiens
SHLDHCMHDHFNAEIVTKTIENKQDAVDYLTWTFLYRRMTQNPNYYNLQGISHRHLSDHLSELVEQTLSDLEQSKCISIEDEMDVAPLNLGMIAAYYYINYTTIELFSMSLNAKTKVRGLIEIISNAAEYENIPIRHHEDNLLRQLAQKVPHKLNNPKFNDPHVKTNLLLQAHLSRMQLSAELQSDTEEILSKAIRLIQACVDVLSSNGWLSPALAAMELAQMVTQAMWSKDSYLKQLPHFTSEHIKRCTDKGVESVFDIMEMEDEERNALLQLTDSQIADVARFCNRYPNIELSYEVVDKDSIRSGGPVVVLVQLEREEEVTGPVIAPLFPQKREEGWWVVIGDAKSNSLISIKRLTLQQKAKVKLDFVAPATGAHNYTLYFMSDAYMGCDQEYKFSVDVKEAETDSDSD

SEQ ID NO: 4988 - protein, 75 aa, Homo sapiens; identical to SEQ ID NO: 3539

SEQ ID NO: 4989 - protein, 91 aa, Homo sapiens
GQCPPCPPQRAVPGHGGPCHVLVTHAWALLGSPTPGGPWGPVKEAPGKSRGRAGRRLCDSSLGPRKRRNKRNWKGRCFRNMFCFFKIYIYL

SEQ ID NO: 4990 - protein, 75 aa, Homo sapiens; identical to SEQ ID NO: 3539

SEQ ID NO: 4991 - protein, 151 aa, Homo sapiens; identical to SEQ ID NO: 3043

SEQ ID NO: 4992 - protein, 151 aa, Homo sapiens; identical to SEQ ID NO: 3043

SEQ ID NO: 4993 - protein, 151 aa, Homo sapiens; identical to SEQ ID NO: 3043

SEQ ID NO: 4994 - protein, 250 aa, Homo sapiens
  SITE (96): Xaa equals any amino acid
MPASSPFLLAPKGPPGNMGGPVREPALSVALWLSWGAALGAVACAMALLTQQTELQSLRREVSRLQGTGGPSQNGEGYPWQSLPEQSSDALEAWEXGERSRKRRAVLTQKQKKQHSVLHLVPINATSKDDSDVTEVMWQPALRRGRGLQAQGYGVRIQDAGVYLLYSQVLFQDVTFTMGQVVSREGQGRQETLFRCIRSMPSHPDRAYNSCYSAGVFHLHQGDILSVIIPRARAKLNLSPHGTFLGFVKL

SEQ ID NO: 4995 - protein, 31 aa, Homo sapiens
MLASSAILGPPAKPRPSAGSLWARATGRAGT

SEQ ID NO: 4996 - protein, 55 aa, Homo sapiens
MWMLVYTSIFLFYSQYSHGHGQCLPKFSEAYQGVSVTQNNLGQPQRRGMHISQKY

SEQ ID NO: 4997 - protein, 95 aa, Homo sapiens
IHPIASPTLPTPAATANALIFLPQSPFLLIPLLRGCLSPLSQTQTSLCNFGISVGSPLPFLNIAFSKLLISIQSLELDLAHGDSAQKVLFTLLPA

SEQ ID NO: 4998 - protein, 87 aa, Homo sapiens
MDIWLSIPLFSLSTHIAVSLCFKYCRFIMFYYLIWLLPAPAPSCPSFLWWWFLSPQNIVASFACLPFIYLFIHQKPTMGKKKKKKGG

SEQ ID NO: 4999 - protein, 514 aa, Homo sapiens
GPAAELVEAMGRVVAELVSSLLGLWLLLCSCGCPEGAELRAPPDKIAIIGAGIGGTSAAYYLRQKFGKDVKIDLFEREEVGGRLATMMVQGQEYEAGGSVIHPLNLHMKRFVKDLGLSAVQASGGLLGIYNGETLVFEESNWFIINVIKLVWRYGFQSLRMHMWVEDVLDKFMRIYRYQSHDYAFSSVEKLLHALGGDDFLGMLNRTLLETLQKAGFSEKFLNEMIAPVMRVNYGQSTDINAFVGAVSLSCSDSGLWAVEGGNKLVCSGLLQASKSNLISGSVMYIEEKTKTKYTGNPTKMYEVVYQIGTETRSDFYDIVLVATPLNRKMSNITFLNFDPPIEEFHQYYQHIVTTLVKGELNTSIFSSRPIDKFGLNTVLTTDNSDLFINSIGIVPSVREKEDPEPSTDGTYVWKIFSQETLTKAQILKLFLSYDYAVKKPWLAYPHYKPPEKCPSIILHDRLYYLNGIECAASAMEMSAIAAHNAALLAYHRWNGHTDMIDQDGLYEKLKTEL

SEQ ID NO: 5000 - protein, 5 aa, Homo sapiens
AGILA

SEQ ID NO: 5001 - protein, 55 aa, Homo sapiens
PAPIIAILSGGARSSAPSGHPQLHSNSHNPSSEETSSATTRPMASTSSAAGPDAW

SEQ ID NO: 5002 - protein, 129 aa, Homo sapiens [sequence omitted]

SEQ ID NO: 5003 - protein, 197 aa, Homo sapiens
TFRLVSAHLKTRKLINPEAAERRWRDWDSRQGWLSVKMQRVSGLLSWTLSRVLWLSGLSEPGAARQPRIMEEKALEVYDLIRTIRDPEKPNTLEELEVVSESCVEVQEINEEEYLVIIRFTPTVPHCSLATLIGLCLRVKLQRCLPFKHKLEIYISEGTHSTEEDINKQINDKERVAAAMENPNLREIVEQCVLEPD

SEQ ID NO: 5004 - protein, 41 aa, Homo sapiens
MERWVDDAFWSFLFSLIPYCNHVFVETISKQSEICLHALNR

SEQ ID NO: 5005 - protein, 264 aa, Homo sapiens; identical to SEQ ID NO: 3551

SEQ ID NO: 5006 - protein, 264 aa, Homo sapiens; identical to SEQ ID NO: 3551

SEQ ID NO: 5007 - protein, 80 aa, Homo sapiens; identical to SEQ ID NO: 3553

SEQ ID NO: 5008 - protein, 80 aa, Homo sapiens
  SITE (31): Xaa equals any amino acid
MSVNPTCLVLIILLFISIILTFKGYLISCVXNCYRYINGRNSSDVLVYVTSNDTTVLLPPYDDATVNGAAKEPPPPYVSA

SEQ ID NO: 5009 - protein, 80 aa, Homo sapiens; identical to SEQ ID NO: 3553

SEQ ID NO: 5010 - protein, 411 aa, Homo sapiens; identical to SEQ ID NO: 3554

SEQ ID NO: 5011 - protein, 341 aa, Homo sapiens
LTSGTLQAWMTVENIDLKTIGFFSLVGQAYVFKFLWSPLMDRYTPPFFGRRRGWLLATQILLLVAIAAMGFLEPGTQLRWMAALAVVIAFCSASQDIVFDAWKTDVLPAEERGAGAAISVLGYRLGMLVSGGLALWLADKWLGWQGMYWLMAALLIPCIIATLLAPEPTDTIPVPKTLEQAVVAPLRDFFGRNNAWLILLLIVLYKLGDAFAMSLTTTFLIRGVGFDAGEVGVVNKTLGLLATIVGALYGGILMQRLSLFRALLIFGILQGASNAGYWLLSITDKHLYSMGAAVFFENLCGGMGTSAFVALLMTLCNKSFSATQFALLSALSAVGRVYVGP

SEQ ID NO: 5012 - protein, 32 aa, Homo sapiens; identical to SEQ ID NO: 3555

SEQ ID NO: 5013 - protein, 1 aa, Homo sapiens
L

SEQ ID NO: 5014 - protein, 230 aa, Homo sapiens
MEPLRLLILLFVTELSGAHNTTVFQGVAGQSLQVSCPYDSMKHWGRRKAWCRQLGEKGPCQRVVSTHNLWLLSFLRRWNGSTAITDDTLGGTLTITLRNLQPHDAGLYQCQSLHGSEADTLRKVLVEVLADPLDHRDAGDLWFPGESESFEDAHVEHSISRSLLEGEIPFPPTSILLLLACIFLIKILAASALWAAAWHGQKPGTHPPSELDCGHDPGYQLQTLPGLRDT

SEQ ID NO: 5015 - protein, 56 aa, Homo sapiens
MALSAETESHIYRALRTASGAAAHLVALGFTIFVAVLARPGSILLPDDRGTTGVFS

SEQ ID NO: 5016 - protein, 183 aa, Homo sapiens
  SITE (60): Xaa equals any amino acid
  SITE (64): Xaa equals any amino acid
  SITE (127): Xaa equals any amino acid
CPHQESVMFLIITRDTMFFTAMKNILSKGNVVHIQNEEEIDVMLHQNAFVIIDTLMNNVXHSNXLTQIERLKPVHVIIFSPFNIKRCLGKVPVTFVPRTITIIDFVALINGSYCSVPEAAVSLSRKXHQVLSCIANQMTTEDILEKLKISLKTFYCHKHNIMMILNLKRINELVRHQHIDYLV

SEQ ID NO: 5017 - protein, 13 aa, Homo sapiens
MGFNTGAWSGVLV

SEQ ID NO: 5018 - protein, 103 aa, Homo sapiens
  SITE (14): Xaa equals any amino acid
  SITE (23): Xaa equals any amino acid
LAWRNGIDTFRLIXIGIGVRAMXVAFNTWLLLKASLETALTAGLWNAGSLNGLTWAKTSPSAPIIILMLIAAALLVRRMRLLEMGDDTACALGVSVERSRLLM

SEQ ID NO: 5019 - protein, 182 aa, Homo sapiens
LAGVALAAVLEGLTSGIALLNPDVYDQLRFWQAGSLDIRNLHTLKVVLIPVLIAGATALLLSRALNSLSLGSDTATALGSRVARTQLIGLLAITVLCGSATAIVGPIAFIGLMMPHMARWLVGADHRWSLPVTLLATPALLLFADIIGRVIVPGELRVSVVSAFIGAPVLIFLVRRKTRGGA

SEQ ID NO: 5020 - protein, 129 aa, Homo sapiens
MGFKHRGVERRAGGDGAVWSGPDGYSRCQQWWAALSLRCWSGCSPGATGIDTFRLIIIGIGVRAMLVAFNTWLLLKASLETALTAGFVECRIAQRPDVGKNLAFRTHHYIDAHCRRLTGTPDALAGNGR

SEQ ID NO: 5021 - protein, 39 aa, Homo sapiens; identical to SEQ ID NO: 3559

SEQ ID NO: 5022 - protein, 152 aa, Homo sapiens
  SITE (91): Xaa equals any amino acid
  SITE (98): Xaa equals any amino acid
  SITE (100): Xaa equals any amino acid
MSSGTELLWPGAALLVLLGVAASLCVRCSRPGAKRSEKIYQQRSLREDQQSFTGSRTYSLVGQAWPGPLADMAPTRKDKLLQFYPSLEDPXSSRYQNXSXGSRHGSEEAYIDPIAMEYYNWGRFSKPPEDDDANSYENVLICKQKTTETGAQ

SEQ ID NO: 5023 - protein, 243 aa, Homo sapiens; identical to SEQ ID NO: 3560

SEQ ID NO: 5024 - protein, 243 aa, Homo sapiens; identical to SEQ ID NO: 3560

SEQ ID NO: 5025 - protein, 321 aa, Homo sapiens
  SITE (5): Xaa equals any amino acid
  SITE (6): Xaa equals any amino acid
STHAXXSSQFLRQPAGPGWRLLPVGERCRASRSQLLVMSYGPLDMYRNPGPSGPQLRDFSSIIQTCSGNIQRISQATAQIKNLMSQLGTKQDSSKLQENLQQLQHSTNQLAKETNELLKELGSLPLPLSTSEQRQQRLQKERLMNDFSAALNNFQAVQRRVSEKEKESIARARAGSRLSAEERQREEQLVSFDSHEEWNQMQSQEDEVAITEQDLELIKERETAIRQLEADILDVNQIFKDLAMMIHDQGDLIDSIEANVESSEVHVERATEQLQRAAYYQKKSRKKMCILVLVLSVIILILGLIIWLVYKTNDCLRSFSR

SEQ ID NO: 5026 - protein, 231 aa, Homo sapiens
MKGRVLALCGLVCFQGLLGWYMVKSGLEEKSDSHDIPRVSQYRLAAHLGSALVLYCASLWTSLSLLLPPHKLPETHQLLQLRRFAHGTAGLVFLTALSGAFVAGLDAGLVYNSFPKMGESWIPEDLFTFSPILRNVFENPTMVQFDHRILGITSVTAITVLYFLSRRIPLPRRTKMAAVTLLALAYTQVGLGISTLLMYVPTPLAATHQSGSLALLTGALWLMNELRRVPK

SEQ ID NO: 5027 - protein, 118 aa, Homo sapiens [sequence omitted]

SEQ ID NO: 5028 - protein, 118 aa, Homo sapiens [sequence omitted]

SEQ ID NO: 5029 - protein, 281 aa, Homo sapiens
  SITE (63): Xaa equals any amino acid
GKAPSNSGRPPQLLSPLLGASLLGDLSSLTSSPGALPSLLQPPGPLLSGQLGLQLLPGGGAPXPLSEASSPLACLLQSLQIPPEQPEAPCLPPESPASALEPEPARPPLSALAPPHGSPDPPVPELLTGRGSGKRGRRGGGGLRGINGEARPARGRKPGSRREPGRLALKWGTRGGFNGQMERSPRRTHHWQHNGELAEGGAEPKDPPPPGPHSEDLKVPPGVVRKSRRGRRRKYNPTRNSNSSRQDITLEPSPTARAAVPLPPRARPGRPAKNKRRKLAP

SEQ ID NO: 5030 - protein, 299 aa, Homo sapiens
RTDPEEEDSETTAAGVTVTVAVTCGAAGSSSSASGPGASPGGSEAGSQGSGEGEGVQLTAAQELMIQQLVAAQLQCNKRSFSDQPKVTPWPLGADPQSRDARQQRFAHFTELAIISVQEIVDFAKQVPGFLQLGREDQIALLKASTIEIMLLETARRYNHETECITFLKDFTYSKDDFHRAGLQVEFINPIFEFSRAMRRLGLDDAEYALLIAINIFSADRPNVQEPGRVEALQQPYVEALLSYTRIKRPQDQLRFPRMLMKLVSLRTLSSVHSEQVFALRLQDKKLPPLLSEIWDVHE

SEQ ID NO: 5031 - protein, 12 aa, Homo sapiens
PEGMGLAVYLCP

SEQ ID NO: 5032 - protein, 358 aa, Homo sapiens
MIPLLLAALLCVPAGALTCYGDSGQPVDWFVVYKLPALRGSGEAAQRGLQYKYLDESSGGWRDGRALINSPEGAVGRSLQPLYRSNTSQLAFLLYNDQPPQPSKAQDSSMRGHTKGVLLLDHDGGFWLVHSVPNFPPPASSAAYSWPHSACTYGQTLLCVSFPFAQFSKMGKQLTYTYPWVYNYQLEGIFAQEFPDLENVVKGHHVSQEPWNSSITLTSQAGAVFQSFAKFSKFGDDLYSGWLAAALGTNLQVQFWHKTVGILPSNCSDIWQVLNVNQIAFPGPAGPSFNSTEDHSKWCVSPKGPWTCVGDMNRNQGEEQRGGGTLCAQLPALWKAFQPLVKNYQPCNGMAREAQQSL

SEQ ID NO: 5033 - protein, 360 aa, Homo sapiens
MIPLLLAALLCVPAGALTCYGDSGQPVDWFVVYKLPALRGSGEAAQRGLQYKYLDESSGGWRDGRALINSPEGAVGRSLQPLYRSNTSQLAFLLYNDQPPQPSKAQDSSMRGHTKGVLLLDHDGGFWLVHSVPNFPPPASSAAYSWPHSACTYGQTLLCVSFPFAQFSKMGKQLTYTYPWVYNYQLEGIFAQEFPDLENVVKGHHVSQEPWNSSITLTSQAGAVFQSFAKFSKFGDDLYSGWLAAALGTNLQVQFWHKTVGILPSNCSDIWQVLNVNQIAFPGPAGPSFNSTEDHSKWCVSPKGPWTCVGDMNRNQGEEQRGGGTLCAQLPALWKAFQPLVKNYQPCNGMARKPSRAYKI

SEQ ID NO: 5034 - protein, 318 aa, Homo sapiens
DMAGDWHWALRVTPGLGVVAVLLLFLVVREPPRGAVERHSDLPPLNPTSWWADLRALARNPSFVLSSLGFTAVAFVTGSLALWAPAFLLRSRVVLGETPPCLPGDSCSSSDSLIFGLITCLTGVLGVGLGVEISRRLRHSNPRADPLVCATGLLGSAPFLFLSLACARGSIVATYIFIFIGETLLSMNWAIVADILLYVVIPTRRSTAEAFQIVLSHLLGDAGSPYLIGLISDRLRRNWPPSFLSEFRALQFSLMLCAFVGALGGAAFLGTAIFIEADRRRAQLHVQGLLHEAGSTDDRIVVPQRGRSTRVPVASVLI

SEQ ID NO: 5035 - protein, 318 aa, Homo sapiens; identical to SEQ ID NO: 5034

SEQ ID NO: 5036 - protein, 273 aa, Homo sapiens
MGFLEPGTQLRWMAALAVVIAFCSASQDIVFDAWKTDVLPAEERGAGAAISVLGYRLGMLVSGGLALWLADKWLGWQGMYWLMAALLIPCIIATLLAPEPTDTIPVPKTLEQAVVAPLRDFFGRNNAWLILLLIVLYKLGDAFAMSLTTTFLIRGVGFDAGEVGVVNKTLGLLATIVGALYGGILMQRLSLFRALLIFGILQGASNAGYWLLSITDKHLYSMGAAVFFENLCGGMGTSAFVALLMTLCNKSFSATQFALLSALSAVGRVYVGP

SEQ ID NO: 5037 - protein, 177 aa, Homo sapiens
MKPINKCIGRNMTYFSGLLVILAFAAWVALAEGLGVAVYAAAVLLGAGCATILVTSLAMTADLIGPHTNSGAFVYGSMSFLDKVANGLAVMAIQSLHPCPSELCCRACVSFYHWAMVAVTGGVGVAAALCLCSLLLWPTRLRRSRGGEHRTPSEGEGISTAPPPCWNETQPQGGAKL

SEQ ID NO: 5038 - protein, 150 aa, Homo sapiens; identical to SEQ ID NO: 3569

SEQ ID NO: 5039 - protein, 150 aa, Homo sapiens; identical to SEQ ID NO: 3569

SEQ ID NO: 5040 - protein, 41 aa, Homo sapiens
FLWSRKLKGELLMSPVLEVALQSLEGAILHPNMQWKVSMTA

SEQ ID NO: 5041 - protein, 326 aa, Homo sapiens
  SITE (210): Xaa equals any amino acid
  SITE (233): Xaa equals any amino acid
  SITE (312): Xaa equals any amino acid
  SITE (317): Xaa equals any amino acid
  SITE (318): Xaa equals any amino acid
  SITE (323): Xaa equals any amino acid
  SITE (326): Xaa equals any amino acid
MLFWVLGLLILCGFLWTRKGKLKIEDITDKYIFITGCDSGFGNLAARTFDKKGFHVIAACLTESGSTALKAETSERLRTVLLDVTDPENVKRTAQWVKNQVGEKGLWGLINNAGVPGVLAPTDWLTLEDYREPIEVNLFGLISVTLNMLPLVKKAQGRVINVSSVGGRLAIVGGGYTPSKYAVEGFNDSLRRDMKAFGVHVSCIEPGLFXTNLADPVKVIEKKLAIWEQLSPXIKQQYGEGYIEKSLDKLKGNKSYVNMDLSPVVECMDHALTSLFPKTHYAAGKDAKIFWTPLSHMPAALQNFLLLKQKAXLANPXXRGFPXSAX

SEQ ID NO: 5042 - protein, 160 aa, Homo sapiens; identical to SEQ ID NO: 3570

SEQ ID NO: 5043 - protein, 132 aa, Homo sapiens
  SITE (115): Xaa equals any amino acid
TLKLSMRSSSRQTKMSKSCLKLVAIFSEVMMKKTLLLCAFLVGLVSSNVMALTLDEARTQGRVGETFYGYLVALKTDAETEKLVADINAERKASYQQLAKQNNVSVDDIAKLAGXQARSSGQTGGICTRDKR

SEQ ID NO: 5044 - protein, 230 aa, Homo sapiens; identical to SEQ ID NO: 5014

SEQ ID NO: 5045 - protein, 8 aa, Homo sapiens
PLQVVLPL

SEQ ID NO: 5046 - protein, 256 aa, Homo sapiens
MRPAALRGALLGCLCLALLCLGGADKRLRDNHEWKKLIMVQHWPETVCEKIQNDCRDPPDYWTIHGLWPDKSEGCNRSWPFNLEEIKDLLPEMRAYWPDVIHSFPNRSRFWKHEWEKHGTCAAQVDALNSQKKYFGRSLELYRELDLNSVLLKLGIKPSINYYQVADFKDALARVYGVIPKIQCLPPSQDEEVQTIGQIELCLTKQDQQLQNCTEPGEQPSPKQEVWLANGAAESRGLRVCEDGPVFYPPPKKTKH

SEQ ID NO: 5047 - protein, 256 aa, Homo sapiens; identical to SEQ ID NO: 5046

SEQ ID NO: 5048 - protein, 58 aa, Homo sapiens [sequence omitted]

SEQ ID NO: 5049 - protein, 69 aa, Homo sapiens [sequence omitted]

SEQ ID NO: 5050 - protein, 44 aa, Homo sapiens
  SITE (7): Xaa equals any amino acid
  SITE (16): Xaa equals any amino acid
MLSARFXGNLLVSLLXTWSDTSSGGPARAYPVVAFAITCPLHGP

SEQ ID NO: 5051 - protein, 57 aa, Homo sapiens [sequence omitted]

SEQ ID NO: 5052 - protein, 53 aa, Homo sapiens; identical to SEQ ID NO: 3580

SEQ ID NO: 5053 - protein, 53 aa, Homo sapiens; identical to SEQ ID NO: 3580

SEQ ID NO: 5054 - protein, 5 aa, Homo sapiens
THKYL

SEQ ID NO: 5055 - protein, 53 aa, Homo sapiens; identical to SEQ ID NO: 3580

SEQ ID NO: 5056 - protein, 238 aa, Homo sapiens; identical to SEQ ID NO: 3581

SEQ ID NO: 5057 - protein, 127 aa, Homo sapiens
  SITE (26): Xaa equals any amino acid
ETGLSWTEVHIVEWKKPSPAPGSNEXERAHPEVTLLEPALQPSGPLSSVKHLTSMQSLIAFPSEGNSMALRGLSDFCKTTAQCSPARAGWDPALLASTLSASPPRAWPECPFLLPHTTRPSYTHRGN

SEQ ID NO: 5058 - protein, 58 aa, Homo sapiens
PGDPLESTCRHASFRVEMCIRDRYNPDEFFYYFYFLRLLVARTLSTTNGFLMFPVIKR

SEQ ID NO: 5059 - protein, 33 aa, Homo sapiens
RALIGGQGKEVSNLPAVTVHPHNTPFYLCYYTL

SEQ ID NO: 5060 - protein, 48 aa, Homo sapiens
  SITE (12): Xaa equals any amino acid
GDQLSMMVEMCXRDRIRAITLHSQIRCQSTVIPLLTSGFWGDRLSSLL

SEQ ID NO: 5061 - protein, 93 aa, Homo sapiens
  SITE (65): Xaa equals any amino acid
  SITE (71): Xaa equals any amino acid
  SITE (74): Xaa equals any amino acid
GSSFLEASEVGWKEKKECIGGKDLRKRRPHRPGEGLSLTPEKMGQDSDQSHHFAQPDPMSEHCHXPADLWXLGXQALISSVAWGLSLIHISTI

SEQ ID NO: 5062 - protein, 20 aa, Homo sapiens
MWVSFGGSLFSLSQLLLYYY

SEQ ID NO: 5063 - protein, 3 aa, Homo sapiens
LWV

SEQ ID NO: 5064 - protein, 67 aa, Homo sapiens
  SITE (3): Xaa equals any amino acid
RSXRSPDLVGLLAQACFPPLLQPRKADVVGLPPSNLDQYEEGPSEASENRHLTSFLRVEKKEQGHRA

SEQ ID NO: 5065 - protein, 37 aa, Homo sapiens
ELRRKSKGIGLSSSEASLLSFMPGGLSIMKIQSPKEQ

SEQ ID NO: 5066 - protein, 83 aa, Homo sapiens
  SITE (27): Xaa equals any amino acid
  SITE (45): Xaa equals any amino acid
ETVLEASEVGWKEKKECIGGKDLRKRXPHRPGEGLSLTPEKMGQXSDQSHHFAQPDPMSEHCHPPADLWFLGRQALISSVAWG

SEQ ID NO: 5067 - protein, 73 aa, Homo sapiens
  SITE (11): Xaa equals any amino acid
  SITE (21): Xaa equals any amino acid
  SITE (25): Xaa equals any amino acid
  SITE (28): Xaa equals any amino acid
  SITE (31): Xaa equals any amino acid
  SITE (60): Xaa equals any amino acid
NRHFSVLHEAXSPIAVSKWTXVHIXEWXKPXPAPGSNELERAHPEVTLLEPALQPSGPLXSVKHLTSMQSLIA

SEQ ID NO: 5068 - protein, 80 aa, Homo sapiens
  SITE (68): Xaa equals any amino acid
EVAISRCVCACALVCKSKLRRCSGGIRKETFQRSKWPIASFFLCPLALPCFKGSKNKGPASLRLVRLXGRKRKNVLGAKT

SEQ ID NO: 5069 - protein, 69 aa, Homo sapiens
EPVSPETRGQQGDDSALTSDLAVQSDGSDLSPVPSSPVLGSDPLLACEVSSSSGLCPQYILSFPSNQPH

SEQ ID NO: 5070 - protein, 70 aa, Homo sapiens
CQSVKRARFETTILPLLKASHPSLLDPGDHHCSLGLWIFIMLSPPGIKLKREASDELSPMPLLFLLNSQK

SEQ ID NO: 5071 - protein, 90 aa, Homo sapiens
DQLSMMVEMCIRDSLTSMQSLIAFPSEGNSMALRGLSDFCKTTAQCSPARAGWDPALLASTLSASPPRAWPECPFLLPHTTRPSYTHRGN

SEQ ID NO: 5072 - protein, 69 aa, Homo sapiens; identical to SEQ ID NO: 5069

SEQ ID NO: 5073 - protein, 211 aa, Homo sapiens; identical to SEQ ID NO: 3583

SEQ ID NO: 5074 - protein, 20 aa, Homo sapiens
MLLSVAIFILLTLVYAYWTM

SEQ ID NO: 5075 - protein, 104 aa, Homo sapiens
KGFHTSIFISVLKSTCYIIIASSNCSKTGDKLFSLKRSSPRAGFFDHSWQSEKGLYGSCPNNSVLKILKMIVNHYPLKVYLKMLLKYRILCTGRFFRPSLIVPS

SEQ ID NO: 5076 - protein, 180 aa, Homo sapiens; identical to SEQ ID NO: 3487

SEQ ID NO: 5077 - protein, 118 aa, Homo sapiens; identical to SEQ ID NO: 4924

SEQ ID NO: 5078 - protein, 180 aa, Homo sapiens; identical to SEQ ID NO: 3487

SEQ ID NO: 5079 - protein, 57 aa, Homo sapiens
MTLMIPLLLLTPITATSTSRWPEIGVVAIRSQLRALHTCGQEPVPAMGSEGAVYASR

SEQ ID NO: 5080 - protein, 46 aa, Homo sapiens
  SITE (24): Xaa equals any amino acid
  SITE (32): Xaa equals any amino acid
PLLLSQPCSSPSASQTLMQLVVNXPRSCFTVXFSGKKKKKTGGGPG

SEQ ID NO: 5081 - protein, 57 aa, Homo sapiens; identical to SEQ ID NO: 5079

SEQ ID NO: 5082 - protein, 286 aa, Homo sapiens
  SITE (173): Xaa equals any amino acid
MLMLMLLMMFAVHCTWVTSNAYSSPSVVLASYNHDGTRNILDDFREAYFWLRQNTDEHARVMSWWDYGYQIAGMANRTTLVDNNTWNNSHIALVGKAMSSNETAAYKIMRTLDVDYVLVIFGGVIGYSGDDINKFLWMVRIAEGEHPKDIRESDYFTPQGEFRVDKAGSPTLXNCLMYKMSYYRFGEMQLDFRTPPGFDRTRNAEIGNKDIKFKHLEEAFTSEHWLVRIYKVKAPDNRETLDHKPRVTNIFPKQKYLSKKTTKRKRGYIKNKLVFKKGKKISKKTV

SEQ ID NO: 5083 - protein, 82 aa, Homo sapiens
  SITE (78): Xaa equals any amino acid
MLMLMLLMMFAVHCTWVTSNAYSSPSVVLASYNHDGTRNILDDFREAYFWLRQNTDEHARVMSWWDYGYQIAGWLIEXRWVD

SEQ ID NO: 5084 - protein, 92 aa, Homo sapiens
QSPSAQCKHVLYEEVQTHLVISSERQQKSFLIQSQKFPKNFKHNIVTKVILLLRLNHARTLFSHLGHYIHDVEMEEYLGICFFLCCLVDSQS

SEQ ID NO: 5085 - protein, 92 aa, Homo sapiens
  SITE (6): Xaa equals any amino acid
  SITE (16): Xaa equals any amino acid
  SITE (31): Xaa equals any amino acid
  SITE (54): Xaa equals any amino acid
VVRSKXGCVHEPPVQXDRCALSGNYRLESNXVRHDLSPLAAATGNRISRARYVXGATEFLKWWPNYGYTRRTVFGICALLKPVTFGKRVGSS

SEQ ID NO: 5086 - protein, 32 aa, Homo sapiens; identical to SEQ ID NO: 3590

SEQ ID NO: 5087 - protein, 124 aa, Homo sapiens
MQFNFELSFKYVLYSSYSWLKLDHTIADCMVFTWTPCRMLDYLYSSYANMLWAGEMKSSSHQDLLFKWLDNWATKELELHLLGFELFWNTLLHFGKSKSSASGALSIENLPSFALKDVLFFIYT

SEQ ID NO: 5088 - protein, 66 aa, Homo sapiens
MGAPWCWLPTVWATCTRSTFCSGSRRPGRTSISGPSCHWVRPGGAWPRPCASWLQETTTGSQSSGP

SEQ ID NO: 5089 - protein, 111 aa, Homo sapiens
  SITE (21): Xaa equals any amino acid
  SITE (22): Xaa equals any amino acid
  SITE (28): Xaa equals any amino acid
  SITE (39): Xaa equals any amino acid
  SITE (41): Xaa equals any amino acid
  SITE (51): Xaa equals any amino acid
  SITE (91): Xaa equals any amino acid
LLQAGAVCCVLRGSQALGHLXXLLPPLXPGAFKLWIGQXMXPQSRRLCSRXPDFLGCAIGPRTEAASLHPGTVVPRMRAGVGAMAFWEPMXKGNPRKQPRLLAASLSCTSC

SEQ ID NO: 5090 - protein, 41 aa, Homo sapiens [sequence omitted]

SEQ ID NO: 5091 - protein, 653 aa, Homo sapiens [sequence omitted]

SEQ ID NO: 5092 - protein, 11 aa, Homo sapiens
WSSRHWEDAAS

SEQ ID NO: 5093 - protein, 5 aa, Homo sapiens
LTMLI

SEQ ID NO: 5094 - protein, 185 aa, Homo sapiens
  SITE (169): Xaa equals any amino acid
  SITE (181): Xaa equals any amino acid
MTPALTALLCLGLSLGPRTRVQAGPFPKPTLWAEPGSVISWGSPVTIWCQGSLEAQEYQLDKEGSPEPLDRNNPLEPKNKARFSIPSMTQHHAGRYRCHYYSSAGWSEPSDPLELVMTGAYSKPTLSALPSPVVASGGNMTLRCGSQKRYHHFGLMKEGEHQLPRTLDXQQLHSGGVQALXLWAP

SEQ ID NO: 5095 - protein, 92 aa, Homo sapiens
MQVSTAALAVLLCTMALCNQFSASLAADTPTACCFSYTSRQIPQNFIADYFETSSQCSKPGVIFLTKRSRQVCADPSEEWVQKYVSDLELSA

SEQ ID NO: 5096 - protein, 101 aa, Homo sapiens
RPSGGGVGAENMAGGKAGKDSGKAKAKAVSRSQRAGLQVLELAGNASKDLKVKRITPRHLQLAIRGDEELDSLIKATIAGGGVIPHIHKSLIGKKGQQKTA

SEQ ID NO: 5097 - protein, 99 aa, Homo sapiens
MKVSAALLCLLLMAATFSPQGLAQPDSVSIPITCCFNVINRKIPIQRLESYTRITNIQCPKEAVIFKTKRGKEVCADPKERWVRDSMKHLDQIFQNLKP

SEQ ID NO: 5098 - protein, 396 aa, Homo sapiens
MLPLLLLPLLWGGSLQEKPVYELQVQKSVTVQEGLCVLVPCSFSYPWRSWYSSPPLYVYWFRDGEIPYYAEVVATNNPDRRVKPETQGRFRLLGDVQKKNCSLSIGDARMEDTGSYFFRVERGRDVKYSYQQNKLNLEVTALIEKPDIHFLEPLESGRPTRLSCSLPGSCEAGPPLTFSWTGNALSPLDPETTRSSELTLTPRPEDHGTNLTCQVKRQGAQVTTERTVQLNVSYAPQNLAISIFFRNGTGTALRILSNGMSVPIQEGQSLFLACTVDSNPPASLSWFREGKALNPSQTSMSGTLELPNIGAREGGEFTCRVQHPLGSQHLSFILSVQRSSSSCICVTEKQQGSWPLVLTLIRGALMGAGFLLTYGLTWIYYTRCGGPQQSRAERPG

SEQ ID NO: 5099 - protein, 563 aa, Homo sapiens
GTSWAGALADGDMLPLLLLPLLWGGSLQEKPVYELQVQKSVTVQEGLCVLVPCSFSYPWRSWYSSPPLYVYWFRDGEIPYYAEVVATNNPDRRVKPETQGRFRLLGDVQKKNCSLSIGDARMEDTGSYFFRVERGRDVKYSYQQNKLNLEVTALIEKPDIHFLEPLESGRPTRLSCSLPGSCEAGPPLTFSWTGNALSPLDPETTRSSELTLTPRPEDHGTNLTCQMKRQGAQVTTERTVQLNVSYAPQTITIFRNGIALEILQNTSYLPVLEGQALRLLCDAPSNPPAHLSWFQGSPALNATPISNTGILELRRVRSAEKGGFTCRAQHPLGFLQIFLNLSVYSLPQLLGPSCSWEAEGLHCRCSFRAWPAPSLCWRLEEKPLEGNSSQGSFKVNSSSPGPWANSSLILHGGLNSDLKVSCKAWNIYGSQSGSVLLLQGRSNLGTGVVPAALGGAGVMALLCICLCLIFFLIVKARRKQAAGRPEKMDDEDPIMGTITSGSRKKPWPDSPGDQASPPGDAPPLEEQKELHYASLSFSEMKSREPKDQEAPSTTEYSEIKTSK

SEQ ID NO: 5100 - protein, 242 aa, Homo sapiens
GDPRVGKMAVELGVLLVRPRPGTGLGRVMRTLLLVLWLATRGSALYFHIGETEKKCFIEEIPDETMVIGNYRTQLYDKQREEYQPATPGLGMFVEVKDPEDKVILARQYGSEGRFTFTSHTPGEHQICLHSNSTKFSLFAGGMLRVHLDIQVGEHANDYAEIAAKDKLSELQLRVRQLVEQVEQIQKEQNYQRWREERFRQTSESTNQRVLWWSILQTLILVAIGVWQMRHLKSFFEAKKLV

SEQ ID NO: 5101 - protein, 99 aa, Homo sapiens; identical to SEQ ID NO: 5097

SEQ ID NO: 5102 - protein, 25 aa, Homo sapiens
  SITE (14): Xaa equals any amino acid
SHCIWRQRLHRSLXVKRSLITWWRQ

SEQ ID NO: 5103 - protein, 34 aa, Homo sapiens; identical to SEQ ID NO: 3609

SEQ ID NO: 5104 - protein, 8 aa, Homo sapiens
RVFPVTTL

SEQ ID NO: 5105 - protein, 93 aa, Homo sapiens
MARLQTALLVVLVLLAVALQATEAGPYGANMEDSVCCRDYVRYRLPLRVVKHFYWTSDSCPRPGVVLLTFRDKEICADPRVPWVKMILNKLSQ

SEQ ID NO: 5106 - protein, 69 aa, Homo sapiens
ECSPYRLAVGLRLKVWGVTLPRHPAQCHPGPVSLPNPGSTCLPQALEGRICLLPMNGALKRPGISFSLL

SEQ ID NO: 5107 - protein, 72 aa, Homo sapiens
PNAEITGVSYHTQPPPFFPNRRLLYLSSFYLCVVSAYISFSPQAFFGWSSNLQYPGLASSEYPPFHFPCLLP

SEQ ID NO: 5108 - protein, 49 aa, Homo sapiens
MPSLRGSSQPPALEHVPVHLFVMLVFILLSSCCHFQTVSGNSIIKLNRK

SEQ ID NO: 5109 - protein, 79 aa, Homo sapiens
  SITE (65): Xaa equals any amino acid
  SITE (66): Xaa equals any amino acid
MPSLRGSSQPPALEHVPVHLFVMLVFILLSSCCHFQTVSGNSISSLSDTVDLRRGGPVPNSPYKXXRITIHWPSFLKRP

SEQ ID NO: 5110 - protein, 43 aa, Homo sapiens
MPSLRGSSQPPALEHVPVHLFVMLVFILLSSCCHFQTVSVCFC

SEQ ID NO: 5111 - protein, 43 aa, Homo sapiens; identical to SEQ ID NO: 5110

SEQ ID NO: 5112 - protein, 263 aa, Homo sapiens; identical to SEQ ID NO: 3612

SEQ ID NO: 5113 - protein, 207 aa, Homo sapiens [sequence omitted]

SEQ ID NO: 5114 - protein, 61 aa, Homo sapiens
  SITE (57): Xaa equals any amino acid
MEAILLNLNLFLYLFPSYDGQYIFPSSIKCPPRSLILPSSALICTVRLPPSFFFFFXKKKG

SEQ ID NO: 5115 - protein, 2 aa, Homo sapiens
DL

SEQ ID NO: 5116 - protein, 10 aa, Homo sapiens
CIQLWEIFLG

SEQ ID NO: 5117 - protein, 286 aa, Homo sapiens
  SITE (253): Xaa equals any amino acid
  SITE (254): Xaa equals any amino acid
  SITE (256): Xaa equals any amino acid
MQAAWLLGALVVPQLLGFGHGARGAEREWEGGWGGAQEEEREREALMLKHLQEALGLPAGRGDENPAGTVEGKEDWEMEEDQGEEEEEEATPTPSSGPSPSPTPEDIVTYILGRLAGLDAGLHQLHVRLHALDTRVVELTQGLRQLRNAAGDTRDAVQALQEAQGRAEREHGRLEGCLKGLRLGHKCFLLSRDFEAQAAAQARCTARGGSLAQPADRQQMEALTRYLRAALAPYNWPVWLGVHDRRAEGPLPXXKXASGGALFWLGIGLTRPRSSGPSPRALAESG

SEQ ID NO: 5118 - protein, 25 aa, Homo sapiens
QMLGQGRGGEPQPATKMPHSPLSNS

SEQ ID NO: 5119 - protein, 323 aa, Homo sapiens; identical to SEQ ID NO: 4054

SEQ ID NO: 5120 - protein, 345 aa, Homo sapiens
  SITE (336): Xaa equals any amino acid
  SITE (338): Xaa equals any amino acid
  SITE (345): Xaa equals any amino acid
YLVVLLISIPIGFLFKKAGPGLKRWGAAAVGLGLTLFTCGPHTLHSLVTILGTWALIQAQPCSCHALALAWTFSYLLFFRALSLLGLPTPTPFTNAVQLLLTLKLVSLASEVQDLHLAQRKEMASGFSKGPTLGLLPDVPSLMETLSYSYCYVGIMTGPFFRYRTYLDWLEQPFPGAVPSLRPLLRRAWPAPLFGLLFLLSSHLFPLEAVREDAFYARPLPARLFYMIPVFFAFRMRFYVAWIAAECGCIAAGFGAYPVAAKARAGGGPTLQCPPPSSPEKAASLEYDYETIRNIDCYSTDFCVRVRDGMRYWNMTVQWWLAQYIYKSAPARSYVXPXWGPRGGX

SEQ ID NO: 5121 - protein, 21 aa, Homo sapiens
LVDLLVASSVEWSECYLLLVS

SEQ ID NO: 5122 - protein, 337 aa, Homo sapiens; identical to SEQ ID NO: 3617

SEQ ID NO: 5123 - protein, 2 aa, Homo sapiens
CK

SEQ ID NO: 5124 - protein, 81 aa, Homo sapiens; identical to SEQ ID NO: 3619

SEQ ID NO: 5125 - protein, 370 aa, Homo sapiens
REQKLELHRGGGRSRTSGSPGLQEFGTSRADLPRPEVAPLRGLPRPKFSAPRGLRAPRSPRPEVSARTMRLGSPGLLFLLFSSLRADTQEKEVRAMVGSDVELSCACPEGSRFDLNDVYVYWQTSESKTVVTYHIPQNSSLENVDSRYRNRALMSPAGMLRGDFSLRLFNVTPQDEQKFHCLVLSQSLGFQEVLSIEVTLHVAANFSVPVVSAPHSPSQDELTFTCTSINGYPRPNVYWINKTDNSLLDQALQNDTVFLNMRGLYDVVSVLRIARTPSVNIGCCIENVLLQQNLTVGSQTGNDIGERDKITENPVSTGEKNAATWSILAVLCLLVVVAVAIGWVCRDRCLQHSYAGAWAVSPETELTGHV

SEQ ID NO: 5126 - protein, 343 aa, Homo sapiens
SRADLPRPEVAPLRGLPRPKFSAPRGLRAPRSPRPEVSARTMRLGSPGLLFLLFSSLRADTQEKEVRAMVGSDVELSCACPEGSRFDLNDVYVYWQTSESKTVVTYHIPQNSSLENVDSRYRNRALMSPAGMLRGDFSLRLFNVTPQDEQKFHCLVLSQSLGFQEVLSIEVTLHVAANFSVPVVSAPHSPSQDELTFTCTSINGYPRPNVYWINKTDNSLLDQALQNDTVFLNMRGLYDVVSVLRIARTPSVNIGCCIENVLLQQNLTVGSQTGNDIGERDKITENPVSTGEKNAATWSILAVLCLLVVVAVAIGWVCRDRCLQHSYAGAWAVSPETELTGHV

SEQ ID NO: 5127 - protein, 328 aa, Homo sapiens
AFAKSYLGDTIEGTPAGTGPEFPGRPTRPGKELNLVFGLQLSMARIGSTVNMNLMGWLYSKIEALLGSAGHTTLGITLMIGGITCILSLICALALAYLDQRAERILHKEQGKTGEVIKLTDVKDFSLPLWLIFIICVCYYVAVFPFIGLGKVFFTEKFGFSSQAASAINSVVYVISAPMSPVFGLLVDKTGKNIIWVLCAVAATLVSHMMLAFTMWNPWIAMCLLGLSYSLLACALWPMVAFVVPEHQLGTAYGFMQSIQNLGLAIISIIAGMILDSRGYLFLEVFFIACVSLSLLSVVLLYLVNRAQGGNLNYSARQREEIKFSHTE

SEQ ID NO: 5128 - protein, 26 aa, Homo sapiens
SKALSVQFLLLRVGWQLYTANADFAV

SEQ ID NO: 5129 - protein, 154 aa, Homo sapiens
  SITE (139): Xaa equals any amino acid
  SITE (142): Xaa equals any amino acid
  SITE (149): Xaa equals any amino acid
  SITE (152): Xaa equals any amino acid
  SITE (154): Xaa equals any amino acid
VLALPGAPAQFPVLEEHRPLQKYMVWSDEMVKTGEAQIHAHLVRPYVGIHLRIGSDWKNACAMLKDGTAGSHFMASPQCVGYSRSTAAPLTMTMCLPDLKEIQRAVKLWVRSLDAQSVYVATDSESYVPELNSSSKGRXRWXAEPEVAXVDXNX

SEQ ID NO: 5130 - protein, 101 aa, Homo sapiens
  SITE (2): Xaa equals any amino acid
GXQGPAPLVLQPLIGRLCGSSFPGDIASPCVPLACRWWWLLLLLIPRSLTALIRPLSSSVTRWPLLHIQVPLFRILPPAWVTFNLSYGSRYLFAEPLQWLP

SEQ ID NO: 5131 - protein, 104 aa, Homo sapiens
FGTSSPVFPKWGKKGQAQWLTPGIPALFGRRRWADPLRSGVRDQPGQHGETPSLLKIQKLASRGVRYLLSWLLGRLRQENHLNPEGGDCSEPRSCCSTPAWVTE

SEQ ID NO: 5132 - protein, 302 aa, Homo sapiens
TRPGKELNLVFGLQLSMARIGSTVNMNLMGWLYSKIEALLGSAGHTTLGITLMIGGITCILSLICALALAYLDQRAERILHKEQGKTGEVIKLTDVKDFSLPLWLIFIICVCYYVAVFPFIGLGKVFFTEKFGFSSQAASAINSVVYVISAPMSPVFGLLVDKTGKNIIWVLCAVAATLVSHMMLAFTMWNPWIAMCLLGLSYSLLACALWPMVAFVVPEHQLGTAYGFMQSIQNLGLAIISIIAGMILDSRGYLFLEVFFIACVSLSLLSVVLLYLVNRAQGGNLNYSARQREEIKFSHTE

SEQ ID NO: 5133 - protein, 69 aa, Homo sapiens [sequence omitted]

SEQ ID NO: 5134 - protein, 165 aa, Homo sapiens
ASLLLSFVWMPALLPVASRLLLLPRVLLTMASGSPPTQPSPASDSGSGYVPGSVSAAFVTCPNEKVAKEIARAVVEKRLAACVNLIPQITSIYEWKGKIEEDSEVLMMIKTQSSLVPALTDFVRSVHPYEVAEVIALPVEQGNFPYLQWVRQVTESVSDSITVLP

SEQ ID NO: 5135 - protein, 37 aa, Homo sapiens
MFPLRPSHHHPLFFVLLGLLQCVVKIILHKICILIGR

SEQ ID NO: 5136 - protein, 227 aa, Homo sapiens [sequence omitted]

SEQ ID NO: 5137 - protein, 175 aa, Homo sapiens
  SITE (157): Xaa equals any amino acid
  SITE (165): Xaa equals any amino acid
  SITE (166): Xaa equals any amino acid
  SITE (174): Xaa equals any amino acid
MLPPMALPSVSWMLLSCLMLLSQVQGEEPQRELPSARIRCPKGSKAYGSHCYALFLSPKSWTDADLACQKRPSGNLVSVLSGAEGSFVSSLVKSIGNSYSYVWIGLHDPTQGTEPNGEGWEWSSSDVMNYFAWERNPSTISSPGHCASLSRSTAFLXWKDYNCNXXLPYVCKFXD

SEQ ID NO: 5138 - protein, 266 aa, Homo sapiens
MDDSTEREQSRLTSCLKKREEMKLKECVSILPRKESPSVRSSKDGKLLAATLLLALLSCCLTVVSFYQVAALQGDLASLRAELQGHHAEKLPAGAGAPKAGLEEAPAVTAGLKIFEPPAPGEGNSSQNSRNKRAVQGPEETGSYTFVPWLLSFKRGSALEEKENKILVKETGYFFIYGQVLYTDKTYAMGHLIQRKKVHVFGDELSLVTLFRCIQNMPETLPNNSCYSAGIAKLEEGDELQLAIPRENAQISLDGDVTFFGALKLL

SEQ ID NO: 5139 - protein, 219 aa, Homo sapiens
  SITE (103): Xaa equals any amino acid
GKGLVKGARAQSSPASRKTRLHPEPLHAPRATRQHTHPAPPEAHPSCNSRPRRQGAGDCSPTPAPPPSCCMTSTHARPGTDWNVCHLGSWGQGSHEAILLFLXLLGLTHSVGKPGAHGASEMPPGWLAWPGAGGRGRRPRWQVEARLTTTEETSRWGRAGLAQLPQAYGGEGGTLPTLGWWHQSSCLFRRWYGGSDPSLGTGPVLENSDSFFVVFYFCF

SEQ ID NO: 5140 - protein, 73 aa, Homo sapiens
ALPVGSIHADVQGPCSTAFFLPSLFCLVQPPQQVSSSCQVSVDGPAPSPLHLVGYPLLFLTTPPGSRLRSSAV

SEQ ID NO: 5141 - protein, 111 aa, Homo sapiens
RCQHSDDKSGVWGWKVLSLSCWFGRWVYSRKLKHQYIIYLKLTSNSVETSRRNVMAFFPFSSSVPLSLPLLTQEGVGQLFSLFLFCYSHILNLHPFLFLLESMDVFVSVVI

SEQ ID NO: 5142 - protein, 195 aa, Homo sapiens
APACTQGHPAAHSSRASRGPPLMQQPPPQAGGWGLQPHSRPSPIVLHDLHARTSRDRLECMSFGVLGEGSHEAILLFLALLGLTHSVGKPGAHGASEMPPGWLAWPGAGGRGRRPRWQVEARLTTTEETSRWGRAGLAQLPQAYGGEGGTLPTLGWWHQSSCLFRRWYGGSDPSLGTGPVLENSDSFFVVFYFCF

SEQ ID NO: 5143 - protein, 87 aa, Homo sapiens
AYPEFYFLMACPPSSLSHTHTHPCSRITRHLHGSSYGNSCIGAAFLFGLGTSVLLVAPLARQLGGVDSDWAAGSSGTAQGGRSDQLV

SEQ ID NO: 5144 - protein, 343 aa, Homo sapiens
  SITE (236): Xaa equals any amino acid
  SITE (323): Xaa equals any amino acid
  SITE (324): Xaa equals any amino acid
  SITE (327): Xaa equals any amino acid
MQGPLLLPGLCFLLSLFGAVTQKTKTSCAKCPPNASCVNNTHCTCNHGYTSGSGQKLFTFPLETCNDINECTPPYSVYCGFNAVCYNVEGSFYCQCVPGYRLHSGNEQFSNSNENTCQDTTSSKTTQGRKELQKIVDKFESLLTNQTLWRTEGRQEISSTATTILRDVESKVLETALKDPEQKVLKIQNDSVAIETQAITDNCSEERKTFNLNVQMNSMDIRCSDIIQGDTQGPSXIAFISYSSLGNIINATFFEEMDKKDQVYLNSQVVSAAIGPKRNVSLSKSVTLTFQHVKMTPSTKKVFCVYWKSTGQGSQWSRDGCFXXHVXKSHTMCNCSHLSSFAA

SEQ ID NO: 5145 - protein, 51 aa, Homo sapiens
  SITE (34): Xaa equals any amino acid
  SITE (48): Xaa equals any amino acid
ICLMNSLFLSFILHNAKEIHGYDFPYGVEYSSFXIFSSLVRRAFPLSXPRP

SEQ ID NO: 5146 - protein, 39 aa, Homo sapiens
MQGPLLLPGLCFLLSLFGAVTQKTKTSCASSWRPHFSPV

SEQ ID NO: 5147 - protein, 45 aa, Homo sapiens
QGAVLHHRRCFALSLPGRLHLDAAGGCAPLPHCTEPDSGQLLKHQ

SEQ ID NO: 5148 - protein, 18 aa, Homo sapiens
IFLIFFFFFLVEGGGGGT

SEQ ID NO: 5149 - protein, 15 aa, Homo sapiens
LLLLLLLLLLLSLKL

SEQ ID NO: 5150 - protein, 92 aa, Homo sapiens
GKRLTLSLDRYILVDIDDIFVGKEGTRMNTNDVKVRLYFLKFQSSVHLPAGIQLSQFVLQLGYPGHGIYWESLGNLGLSLTLNQLRRLCISI

SEQ ID NO: 5151 - protein, 54 aa, Homo sapiens
  SITE (48): Xaa equals any amino acid
VWLKFLYSLPFPVTTPTTLFSKFLLLFLSQQLDQELPAGQDHVFSDAXSWQGET

SEQ ID NO: 5152 - protein, 273 aa, Homo sapiens
MSGSQSEVAPSPQSPRSPEMGRDLRPGSRVLLLLLLLLLVYLTQPGNGNEGSVTGSCYCGKRISSDSPPSVQFMNRLRKHLRAYHRCLYYTRFQLLSWSVCGGNKDPWVQELMSCLDLKECGHAYSGIVAHQKHLLPTSPPTSQASEGASSDIHTPAQMLLSTLQSTQRPTLPVGSLSSDKELTRPNETTIHTAGHSLAVGPEAGENQKQPEKNAGPTARTSATVPVLCLLAIIFILTAALSYVLCKRRRGQSPQSSPDLPVHYIPVAPDSNT

SEQ ID NO: 5153 - protein, 234 aa, Homo sapiens
MRKTRLWGLLWMLFVSELRAATKLTEEKYELKEGQTLDVKCDYTLEKFASSQKAWQIIRDGEMPKTLACTERPSKNSHPVQVGRIILEDYHDHGLLRVRMVNLQVEDSGLYQCVIYQPPKEPHMLFDRIRLVVTKGFSGTPGSNENSTQNVYKIPPTTTKALCPLYTSPRTVTQAPPKSTADVSTPDSEINLTNVTDIIRVPVFNIVILLAGGFLSKSLVFSVLFAVTLRSFVP

SEQ ID NO: 5154 - protein, 4 aa, Homo sapiens
LVDS

SEQ ID NO: 5155 - protein, 194 aa, Homo sapiens
MRKTRLWGLLWMLFVSELRAATKLTEEKYELKEGQTLDVKCDYTLEKFASSQKAWQIIRDGEMPKTLACTERPSKNSHPVQVGRIILEDYHDHGLLRVRMVNLQVEDSGLYQCVIYQPPKEPHMLFDRIRLVVTKGFSGTPGSNENSTQNVYKIPPTTTKALCPLYTSPRTVTQAPPKSTADVSTPDSEINLTM

SEQ ID NO: 5156 - protein, 186 aa, Homo sapiens
SDNSKGFSFWKCEEGISASRSGAGWQTPSLETICRPSGRKSSKMQAFRIWDVNQKTFYLRNNQLVAGYLQGPNVNLEEKIDVVPIEPHALFLGIHGGKMCLSCVKSGDETRLQLEAVNITDLSENRKQDKRFAFIRSDSGPTTSFESAACPGWFLCTAMEADQPVSLTNMPDEGVMVTKFYFQEDE

SEQ ID NO: 5157 - protein, 11 aa, Homo sapiens
VNMIGALGHCH

SEQ ID NO: 5158 - protein, 36 aa, Homo sapiens; identical to SEQ ID NO: 3644

SEQ ID NO: 5159 - protein, 4 aa, Homo sapiens
CIYI

SEQ ID NO: 5160 - protein, 225 aa, Homo sapiens
  SITE (96): Xaa equals any amino acid
MDLRAGDSWGMLACLCTVLWHLPAVPALNRTGDPGPGPSIQKTYDLTRYLEHQLRSLAGTYLNYLGPPFNEPDFNPPRLGAETLPRATVDLEVWRXLNDKLRLTQNYEAYSHLLCYLRGLNRQAATAELRRSLAHFCTSLQGLLGSIAGVMAALGYPLPQPLPGTEPTWTPGPAHSDFLQKMDDFWLLKELQTWLWRSAKDFNRLKKKMQPPAAAVTLHLGAHGF

SEQ ID NO: 5161 - protein, 4 aa, Homo sapiens
ILRF

SEQ ID NO: 5162 - protein, 263 aa, Homo sapiens
  SITE (99): Xaa equals any amino acid
  SITE (100): Xaa equals any amino acid
  SITE (102): Xaa equals any amino acid
  SITE (142): Xaa equals any amino acid
  SITE (205): Xaa equals any amino acid
ARLSSLTSTPRRPLHRAPLLPGRLCWSPRPLEKNKAMGRPLLLPLLPLLLPPAFLQPSGSTGSGPSYLYGVTQPKHLSASMGGSVEIPFSFYYPWELAXXPXVRISWRRGHFHGQSFYSTRPPSIHKDYVNRLFLNWTEGQXSGFLRISNLRKEDQSVYFCRVELDTRRSGRQQLQSIKGTKLTITQAVTTTTTWRPSSTTTIAXLRVTESKGHSESWHLSLDTAIRVALAVAVLKTVILGLLCLLLLWWRRRKGEGWFVFYR

SEQ ID NO: 5163 - protein, 303 aa, Homo sapiens; identical to SEQ ID NO: 3646

SEQ ID NO: 5164 - protein, 34 aa, Homo sapiens
  SITE (2): Xaa equals any amino acid
  SITE (7): Xaa equals any amino acid
  SITE (17): Xaa equals any amino acid
MXPYIYXKNLHVVEPMXFIYMVLVTGLLYFLEVC

SEQ ID NO: 5165 - protein, 34 aa, Homo sapiens
  SITE (20): Xaa equals any amino acid
MFPYIYSKNLHVVEPMEFIXMVLVTGLLYFLEVC

SEQ ID NO: 5166 - protein, 27 aa, Homo sapiens
  SITE (7): Xaa equals any amino acid
MVSPWIXLFSFCSCPVKHGRFFGTLGF

SEQ ID NO: 5167 - protein, 79 aa, Homo sapiens; identical to SEQ ID NO: 3652

SEQ ID NO: 5168 - protein, 71 aa, Homo sapiens; identical to SEQ ID NO: 3653

SEQ ID NO: 5169 - protein, 56 aa, Homo sapiens; identical to SEQ ID NO: 3655

SEQ ID NO: 5170 - protein, 16 aa, Homo sapiens
LPVKCIGAWGEWGVKP

SEQ ID NO: 5171 - protein, 18 aa, Homo sapiens
LLCCTCRLPHFTGQWQTH

SEQ ID NO: 5172 - protein, 66 aa, Homo sapiens [sequence omitted]

SEQ ID NO: 5173 - protein, 21 aa, Homo sapiens
VLSCIPFCLYLNECIALFYSE

SEQ ID NO: 5174 - protein, 58 aa, Homo sapiens
NRYTLCVCVCVCARSMCVLCCVSTKQMSTHLPLGDLTNVHELVLLDQLRGPWTEDGNG

SEQ ID NO: 5175 - protein, 377 aa, Homo sapiens
VRNGSFCSPGSEPPGAARGLAAPRPRCPPGVPLLRAPAAGCQLFGAPSRTQRRERARDKLELRPPRPSPAPLPLPPRGRAPTMLQGPGSLLLLFLASHCCLGSARGLFLFGQPDFSYKRSNCKPIPANLQLCHGIEYQNMRLPNLLGHETMKEVLEQAGAWIPLVMKQCHPDTKKFLCSLFAPVCLDDLDETIQPCHSLCVQVKDRCAPVMSAFGFPWPDMLECDRFPQDNDLCIPLASSDHLLPATEEAPKVCEACKNKNDDDNDIMETLCKNDFALKIKVKEITYINRDTKIILETKSKTIYKLNGVSERDLKKSVLWLKDSLQCTCEEMNDINAPYLVMGQKQGGELVITSVKRWQKGQREFKRISRSIRKLQC

SEQ ID NO: 5176 - protein, 14 aa, Homo sapiens
QSWWCQNLSSFACL

SEQ ID NO: 5177 - protein, 43 aa, Homo sapiens
TLSMFPSSKLSYGVTEAVRDLLTQCHSIDSEFTADYIRPNCFF

SEQ ID NO: 5178 - protein, 110 aa, Homo sapiens
KHPQSKCRKRDPRHRNGHTQSIRPTVTPDGGDNSRRHTKYNRPDHTGYGQPQRWHKAAGNLIGNRTTRHHRQAKIPLHSIADIVPELVIQRLIQPQLLTHQFYNLRISFR

SEQ ID NO: 5179 - protein, 138 aa, Homo sapiens
LPQTNRQEAFPESMRNTTFLAPYLVQRVGVTFNIFFGDTTEHFPVTPGGVEQNDRYQNHRNPGHDVKRHWLEVASHIVRLAFIMVLDGITNGNIAIPAVRMMQASVREENTNAHAALSIRAVRMVSSGRTTPSAGIAH

SEQ ID NO: 5180 - protein, 13 aa, Homo sapiens
  SITE (2): Xaa equals any amino acid
YXAILAPLKLKLL

SEQ ID NO: 5181 - protein, 23 aa, Homo sapiens
CYSLVTKLPVLSSVKLRQSINML

SEQ ID NO: 5182 - protein, 23 aa, Homo sapiens
CYSLVTKLPVLSSVKLRQSINML

SEQ ID NO: 5183 - protein, 96 aa, Homo sapiens
KWLGAKMLIIKRSVAIIAILFSPLSTASNLTSQLHNFFSAQLAGVSDEVRVSIRTAPNLLPPCEQPLLSMSNNSRLWGNVNVLARCGNEGGPGDPI

SEQ ID NO: 5184 - protein, 23 aa, Homo sapiens
MVFCGAFKGCFVCLFVCLFVLQG

SEQ ID NO: 5185 - protein, 225 aa, Homo sapiens
  SITE (154): Xaa equals any amino acid
  SITE (177): Xaa equals any amino acid
ASLQRSRVLRCCSCRLFQAHQVKKSVKWTCKACGEKQSFLRAYGEGSGADCRRHVQKLNLLQGQVSELPLRSLEETVSASEEENVGHQQAGNVKQQEKSQPSESRWLKYLEKDSQELELEGTGVCFSKQPSSKMEEPGPRFSQDLPRKRKWSGXTVQPPCSRACRTRVALRSPGDPXGTGWPDMEGETRQQPLPPGELCRLQCRGAEGSWEGAMESHPAGYSHIL

SEQ ID NO: 5186 - protein, 112 aa, Homo sapiens
FAVRWKAFICFVLLTLKIKACPSLTASSRKCQNQRPSQGPGRAGGPPGPWHCSYKWRAWPSSLSGTGWPDMEGETRQQPLPPGELCRLQCRGAEGSWEGAMESHPAGYSHIL

SEQ ID NO: 5187 - protein, 188 aa, Homo sapiens
MRSCPEEQYWDPLLGTCMSCKTICNHQSQRTCAAFCRSLSCRKEQGKFYDHLLRDCISCASICGQHPKQCAYFCENKLRSPVNLPPELRRQRSGEVENNSDNSGRYQGLEHRGSEASPALPGLKLSADQVALVYSTLGLCLCAVLCCFLVAVACFLKKRGDPCSCQPRSRPRQSPAKSSQDHAMEAGS

SEQ ID NO: 5188 - protein, 97 aa, Homo sapiens; identical to SEQ ID NO: 3677

SEQ ID NO: 5189 - protein, 97 aa, Homo sapiens; identical to SEQ ID NO: 3677

SEQ ID NO: 5190 - protein, 97 aa, Homo sapiens; identical to SEQ ID NO: 3677

SEQ ID NO: 5191 - protein, 73 aa, Homo sapiens; identical to SEQ ID NO: 4532

SEQ ID NO: 5192 - protein, 44 aa, Homo sapiens; identical to SEQ ID NO: 3680

SEQ ID NO: 5193 - protein, 215 aa, Homo sapiens; identical to SEQ ID NO: 3682

SEQ ID NO: 5194 - protein, 215 aa, Homo sapiens; identical to SEQ ID NO: 3682

SEQ ID NO: 5195 - protein, 215 aa, Homo sapiens
  SITE (160): Xaa equals any amino acid
  SITE (167): Xaa equals any amino acid
  SITE (197): Xaa equals any amino acid
  SITE (202): Xaa equals any amino acid
  SITE (206): Xaa equals any amino acid
  SITE (210): Xaa equals any amino acid
  SITE (215): Xaa equals any amino acid
MRLPAWCRHTTLAISCWHCLVLARASADSASLPTISHLGVKPLSVGWGAPSTLPVSPCGGKPAAPTSASPAAAPLRFWRPGASGGGAGGTRRLALCRLVTARTTLATGTPGLSARPRQRPCLLPVLPRRPAELSVSLEPSPGSSGRGFLCLPFCKRDADXSLGQTLXSSCSLSSILVGGTLRPRCSCPPFTQRSAFXLRTPXNQYXHGSXSLASX

SEQ ID NO: 5196 - protein, 215 aa, Homo sapiens
MRLPAWCRHTTLAISCWHCLVLARASADSASLPTISHLGVKPLSVGWGAPSTLPVSPCGGKPAAPTSASPAAAPLRFWRPGASGGGAGGTRRLALCRLVTARTTLATGTPGLSARPRQRPCLLPVLPRRPAELSVSLEPSPGSSGRGFLCLPFCKRDADTSLGQTLTSSCSLSSILVGGTLRPRCSCPPFTQRSAFHLRTPPNQYPHGSTSLASH

SEQ ID NO: 5197 - protein, 215 aa, Homo sapiens; identical to SEQ ID NO: 3682

SEQ ID NO: 5198 - protein, 199 aa, Homo sapiens
MGAAVLCASFMSFGVKRRWFALGAALQLAISTYAAYIGGYVHYGDWLKVRMYSRTVAIIGGFLVLASGAGELYRRKPRSRSLQSTGQVFLGIYLICVAYSLQHSKEDRLAYLNHLPGGELMIQLFFVLYGILALAFLSGYYVTLAAQILAVLLPPVMLLIDGNVAYWHNTRRVEFWNQMKLLGESVGIFGTAVILATDG

SEQ ID NO: 5199 - protein, 141 aa, Homo sapiens; identical to SEQ ID NO: 3684

SEQ ID NO: 5200 - protein, 199 aa, Homo sapiens; identical to SEQ ID NO: 5198

SEQ ID NO: 5201 - protein, 199 aa, Homo sapiens; identical to SEQ ID NO: 5198

SEQ ID NO: 5202 - protein, 31 aa, Homo sapiens
MNIRLKCLLKPKNVSKVCSRGLYFIYVMDSL

SEQ ID NO: 5203 - protein, 263 aa, Homo sapiens
KIMASPDWGYDDKNGPEQWSKLYPIANGNNQSPVDIKTSETKHDTSLKPISVSYNPATAKEIINVGHSFHVNFEDNDNRSVLKGGPFSDSYRLFQFHFHWGSTNEHGSEHTVDGVKYSAELHVAHWNSAKYSSLAEAASKADGLAVIGVLMKVGEANPKLQKVLDALQAIKTKGKRAPFTNFDPSTLLPSSLDFWTYPGSLTHPPLYESVTWIICKESISVSSEQLAQFRSLLSNVEGDNAVPMQHNNRPTQPLKGRTVRASF

SEQ ID NO: 5204 - protein, 89 aa, Homo sapiens; identical to SEQ ID NO: 3687

SEQ ID NO: 5205 - protein, 89 aa, Homo sapiens; identical to SEQ ID NO: 3687

SEQ ID NO: 5206 - protein, 46 aa, Homo sapiens
MLMFCHGKRFQTSFFLFLFLLLLRKLMLCFSESNEVEVYKANFLLV

SEQ ID NO: 5207 - protein, 46 aa, Homo sapiens; identical to SEQ ID NO: 5206

SEQ ID NO: 5208 - protein, 167 aa, Homo sapiens; identical to SEQ ID NO: 3689

SEQ ID NO: 5209 - protein, 261 aa, Homo sapiens
  SITE (192): Xaa equals any amino acid
  SITE (198): Xaa equals any amino acid
  SITE (215): Xaa equals any amino acid
  SITE (233): Xaa equals any amino acid
  SITE (252): Xaa equals any amino acid
MTGSPRGLGSYGHMPTSLCRTSGLSPLYSPPHPSPLDGPWWCHPKQIDTIFPLVTAKGENHPSPNFNQYVRDQGAMTDQLSRRQIREYQLYSRTSGKHVQVTGRRISATAEDGNKFAKLIVETDTFGSRVRIKGAESEKYICMNKRGKLIGKPSGKSKDCVFTEIVLENNYTAFQNARHEGWFMAFTRQGRXRQASRXPPEPARGPLHQAAFYQXPSLPFPNQRRRKQETSFXVLWASGPNPGRNQSATTGXGPPKAPFNR

SEQ ID NO: 5210 - protein, 172 aa, Homo sapiens
  SITE (1): Xaa equals any amino acid
  SITE (36): Xaa equals any amino acid
XRGCVVEGNPVLAGSCDSTCSHLVVPILLLVSLGSXLACLTHTPSFMLILRGVKKEDKTLAVGIQFMFLRILAWMPSPVIHGSAIDTTCVHWALSCGRRAVCRYYNNDLLRNRFIGLQFFFKTGSVICFALVLAVLRQQDKEARTKESRSSPAVEQQLLVSGPGKKPEDSRV

SEQ ID NO: 5211 - protein, 46 aa, Homo sapiens; identical to SEQ ID NO: 3692

SEQ ID NO: 5212 - protein, 3 aa, Homo sapiens
LRI

SEQ ID NO: 5213 - protein, 46 aa, Homo sapiens; identical to SEQ ID NO: 3692

SEQ ID NO: 5214 - protein, 37 aa, Homo sapiens
MLFSLPGSLFPSLPGQSCLSSGLVLDITSSGKSSFPL

SEQ ID NO: 5215 - protein, 78 aa, Homo sapiens
MRKPRCTRGIFLFCFLFLFVFETGFCFVAQAGMQWHKHGSLQSQTPGQHDEIPSLLKIEKLAGRGGAHLCSQFLGRLR

SEQ ID NO: 5216 - protein, 45 aa, Homo sapiens
MAWVQAGLQWAVLAATIKVSVLGSSPQPRGVVPHFIERGFPAHRR

SEQ ID NO: 5217 - protein, 45 aa, Homo sapiens; identical to SEQ ID NO: 5216

SEQ ID NO: 5218 - protein, 401 aa, Homo sapiens
MNKLLCCALVFLDISIKWTTQETFPPKYLHYDEETSHQLLCDKCPPGTYLKQHCTAKWKTVCAPCPDHYYTDSWHTSDECLYCSPVCKELQYVKQECNRTHNRVCECKEGRYLEIEFCLKHRSCPPGFGVVQAGTPERNTVCKRCPDGFFSNETSSKAPCRKHTNCSVFGLLLTQKGNATHDNICSGNSESTQKCGIDVTLCEEAFFRFAVPTKFTPNWLSVLVDNLPGTKVNAESVERIKRQHSSQEQTFQLLKLWKHQNKDQDIVKKIIQDIDLCENSVQRHIGHANLTFEQLRSLMESLPGKKVGAEDIEKTIKACKPSDQILKLLSLWRIKNGDQDTLKGLMHALKHSKTYHFPKTVTQSLKKTIRFLHSFTMYKLYQKLFLEMIGNQVQSVKISCL

SEQ ID NO: 5219 - protein, 12 aa, Homo sapiens
LWLVKEERTRGS

SEQ ID NO: 5220 - protein, 12 aa, Homo sapiens
TKTFILMIFLML

SEQ ID NO: 5221 - protein, 77 aa, Homo sapiens
MLRCWPLFWLPLVSPFCSLFWLLVEWFGTNIDRESYDAIGGPSWMTASSFCLSNSNIWSLEISSGSTSVVHSQQAMD

SEQ ID NO: 5222 - protein, 77 aa, Homo sapiens; identical to SEQ ID NO: 5221

SEQ ID NO: 5223 - protein, 77 aa, Homo sapiens; identical to SEQ ID NO: 5221

SEQ ID NO: 5224 - protein, 172 aa, Homo sapiens
METRPRLGATCLLGFSFLLLVISSDGHNGLGKGFGDHIHWRTLEDGKKEAAASGLPLMVIIHKSWCGACKALKPKFAESTEISELSHNFVMVNLEDEEEPKDEDFSPDGGYIPRILFLDPSGKVHPEIINENGNPSYKYFYVSAEQVVQGMKEAQERLTGDAFRKKHLEDEL

SEQ ID NO: 5225 - protein, 99 aa, Homo sapiens
  SITE (7): Xaa equals any amino acid
  SITE (23): Xaa equals any amino acid
KRSPYFXPFSPGKNLGLLPESWXLPSSSPAWASLFARMCMQEWLCVWTQPQLEACFPLVLLQKQKPSSPRWSHFCQVVNCIFVLRLTKKFRNTNCSIKL

SEQ ID NO: 5226 - protein, 38 aa, Homo sapiens
EERSHCGRLLLTGAGLHACGSSRVWQTSFFRLLLGVRH

SEQ ID NO: 5227 - protein, 415 aa, Homo sapiens
  SITE (378): Xaa equals any amino acid
MRFLLLTSTCCLLAMALAAEVKKPAAPGTAEKLSPKAATLAERSAGLAFSLYQAMAKDQAVENILLSPVVVASSLGLVSLGGKATTASQAKAVLSAEQLRDEEVHAGLGELLRAFSNSTARNVTWKLGSRLYGPSSVSFAEDFVRSSKQHYNCEHSKINFRDKRSALQSINEWAAQTTDGKLPEVTKDVERTDGALLVNAMFFKPHWDEKFHHKMVDNRGFMVTRSYTVGVTMMHRTGLYNYYDDEKEKLQMVEMPLAHKLSSLLILMPHHVEPLERLEKLLTKEQLKIWMGKMQKKAVAISLPKGVVEVTHDLQKHLAGLGLTEAIDKNKADLSRMSGKKDLYLASVFHATAFEWDTEGNPFDQDIYGREELRSPKXFYADHPFIFLVRDTQTGSLLFIGRLVRPKGDKMRDEL

SEQ ID NO: 5228 - protein, 110 aa, Homo sapiens; identical to SEQ ID NO: 4475

SEQ ID NO: 5229 - protein, 156 aa, Homo sapiens
  SITE (8): Xaa equals any amino acid
  SITE (138): Xaa equals any amino acid
  SITE (145): Xaa equals any amino acid
MAPLCPRXWLPLSIPALSPGPALQLLLALLLLVPAHAQSLSRIQGTPELGGDSSGEDDQLDGEKLPSEEDLPREDPPGDEDLLGEQDPSGMKTEPGKEDSLKLEDLPTVEAPRDPQGSQNNDYRHNKGDDHSHWRLWXRPALASXVPSCAGASNRR

SEQ ID NO: 5230 - protein, 148 aa, Homo sapiens
  SITE (145): Xaa equals any amino acid
MAATAAVRAQAGTRQAPALWQMRWLPLLLMAVAAAEQQVPLVLWSSDRDLWGPAANTHEGHITSDLQLSTYLDPALELGPRNVLLFLQDKLSIEDFTAYGGVFGNKQDSAFSNLENALDLAPSSLVLPAVDWYAASTLSTYCRRXSGA

SEQ ID NO: 5231 - protein, 199 aa, Homo sapiens [sequence omitted]

SEQ ID NO: 5232 - protein, 128 aa, Homo sapiens
  SITE (111): Xaa equals any amino acid
LPLSYLGDTIEGTPAGTGPEFPGRPTRPPTRPRKMLLSFYCLPMVSIHIFFPCAHCVYLLHISCSLGEESFNRDTCKKDFCFSIQNVNSTFLLSLAVFRFSERFSDSNFLXTTPPICSEKNGLLYHWI

SEQ ID NO: 5233 - protein, 199 aa, Homo sapiens; identical to SEQ ID NO: 3708

SEQ ID NO: 5234 - protein, 12 aa, Homo sapiens
GGMVSLPASFLV

SEQ ID NO: 5235 - protein, 123 aa, Homo sapiens
RPPTRPRKMLLSFYCLPMVSIHIFFPCAHCVYLLHISCSLGEESFNRDTCKKDFCFSIQNVNSTFLLSLAVFRFSERFSDSNFLFTTPPICSEKNGLLYIGFRSGTISVILSLVILGRLLTLN

SEQ ID NO: 5236 - protein, 547 aa, Homo sapiens
MCLLGGLSAPPLLLLPLLPLLLCPPTAQGDCSFPPELPNAIQSVGDQQSFPEKFTVTYKCKEGFVKVPGKADSVVCLNNKWSEVAEFCNRSCDVPTRLQFASLKKSFTKQNYFPVGSVVEYECRPGYQRDHLLSGKLTCLLNFTWSKPDEFCKRKSCPNPGDLRHGHVNIPTDILYAAVIHFSCNKGYRLVGAASSYCSIVNDDVGWSDPLPECQEIFCPEPPKISNGVILDQQNTYVYQQAVKYECIKGFTLIGENSIYCTVKGDQGEWSGPPPECKGSQISTVIPATETPTTVSASATKPTSAPQKPTTANVTGTKVTSAPQKPTTGNVPGTEATSTPQKPTTADVSETPSAVQNPITANASATQAMPATHRSSTAKASFTQSLPATRKSTAIHAPVTKGLHTTKRLTSARITAKQSSATPRTTSAPHGRGTLSSDAAIIAVGKFGSSAVKKNCHHCGMYNPYSWRRILSFYCLRNTIKMKCLRSGRRRVNAFYRRVWWTPLGTRYVPKSSQPCSCSKVILGQLHIIWPVNQVSLNAYCLNALSF

SEQ ID NO: 5237 - protein, 372 aa, Homo sapiens
MCLLGGLSAPPLLLLPLLPLLLCPPTAQGDCSFPPELPNAIQSVGDQQSFPEKFTVTYKCKEGFVKVPGKADSVVCLNNKWSEVAEFCNRSCDVPTRLQFASLKKSFTKQNYFPVGSVVEYECRPGYQRDHLLSGKLTCLLNFTWSKPDEFCKRKSCPNPGDLRHGHVNIPTDILYAAVIHFSCNKGYRLVGAASSYCSIVNDDVGWSDPLPECQEIFCPEPPKISNGVILDQQNTYVYQQAVKYECIKGFTLIGENSIYCTVKGDQGEWSGRRLNAKVLRFLQSYQQQRHHHSKCFSYKAHISSSETHHCKCYRYQSYISSSETHHRECSRYRSYINSSETHYSGCFRDPVSSPESHHGKCVCYTGHASNP

SEQ ID NO: 5238 - protein, 555 aa, Homo sapiens
LPSRSPRAMCLLGGLSAPPLLLLPLLPLLLCPPTAQGDCSFPPELPNAIQSVGDQQSFPEKFTVTYKCKEGFVKVPGKADSVVCLNNKWSEVAEFCNRSCDVPTRLQFASLKKSFTKQNYFPVGSVVEYECRPGYQRDHLLSGKLTCLLNFTWSKPDEFCKRKSCPNPGDLRHGHVNIPTDILYAAVIHFSCNKGYRLVGAASSYCSIVNDDVGWSDPLPECQEIFCPEPPKISNGVILDQQNTYVYQQAVKYECIKGFTLIGENSIYCTVKGDQGEWSGPPPECKGSQISTVIPATETPTTVSASATKPTSAPQKPTTANVTGTKVTSAPQKPTTGNVPGTEATSTPQKPTTADVSETPSAVQNPITANASATQAMPATHRSSTAKASFTQSLPATRKSTAIHAPVTKGLHTTKRLTSARITAKQSSATPRTTSAPHGRGTLSSDAAIIAVGKFGSSAVKKNCHHCGMYNPYSWRRILSFYCLRNTIKMKCLRSGRRRVNAFYRRVWWTPLGTRYVPKSSQPCSCSKVILGQLHIIWPVNQVSLNAYCLNALSF

SEQ ID NO: 5239 - protein, 555 aa, Homo sapiens; identical to SEQ ID NO: 5238

SEQ ID NO: 5240 - protein, 394 aa, Homo sapiens
PRVRLPLLAGASFHLTPVPVPARHVPPRRAERPAAAAAAAAAAAAVSAYGQGDCSFPPELPNAIQSVGDQQSFPEKFTVTYKCKEGFVKVPGKADSVVCLNNKWSEVAEFCNRSCDVPTRLQFASLKKSFTKQNYFPVGSVVEYECRPGYQRDHLLSGKLTCLLNFTWSKPDEFCKRKSCPNPGDLRHGHVNIPTDILYAAVIHFSCNKGYRLVGAASSYCSIVNDDVGWSDPLPECQEIFCPEPPKISNGVILDQQNTYVYQQAVKYECIKGFTLIGENSIYCTVKGDQGEWSGRRLNAKVLRFLQSYQQQRHHHSKCFSYKATSALRNPPLQMLQVPKLHQLSETHHRECSRYRSYINSSETHYSGCFRDPVSSPESHHGKCVCYTGHASNP

SEQ ID NO: 5241 - protein, 44 aa, Homo sapiens
GAAEGLLGPLVELPPLPAPCQAQHLPQRPRCDRGARLPPGGVVR

SEQ ID NO: 5242 - protein, 70 aa, Homo sapiens
  SITE (44): Xaa equals any amino acid
  SITE (45): Xaa equals any amino acid
  SITE (52): Xaa equals any amino acid
AGPGRLAPSAPLPTWPRGPCPPFWICCPHLSPLTCVLGSPKAMXXGQTGPGXGGWYIKPHSMACFPRAKI

SEQ ID NO: 5243 - protein, 207 aa, Homo sapiens
  SITE (162): Xaa equals any amino acid
  SITE (177): Xaa equals any amino acid
  SITE (179): Xaa equals any amino acid
  SITE (186): Xaa equals any amino acid
VAQQFVMGQLKGFSAHWWNFRHFQHHAKPNIFHKDPDVTVAPVFLLGESSVEYGKKKRRYLPYHRQHLYFFLIGPPLLTLVNFEVENLAYMLVCMQWTDLLWAASFYSRFFLCYAPFYGLPGALLLFVAVRVLESHWFVWITQMNHIPKEIGHEKHRDWASXQLAATCNVEPSLFIXWXSGHLNFXIEHHLFPTMPRHNYRRVAPLV

SEQ ID NO: 5244 - protein, 206 aa, Homo sapiens
MEVLAWLLVYLFGPGWVPSTLAALVLATSQAQCWCLQHDLGHTSVFRKSQWNHVAQQFVMGQLKGFSAHWWNFRHFQHHAKPNIFHKDPDVTVAPVFLLGESSVEYGKKKRRYLPYHRQHLYFFLIGPPPAHPGELRGGKSGLHAGVHAVDGPAVGRQLLLPLLPMLRPLLRPPWGPAPLRCCQGPGEPLVRVDHADESHPQGDWP

SEQ ID NO: 5245 - protein, 39 aa, Homo sapiens
  SITE (5): Xaa equals any amino acid
  SITE (8): Xaa equals any amino acid
WCPSXCSXSRPTTMSGPGTSTTQAGSKPFSWSTQRPGER

SEQ ID NO: 5246 - protein, 12 aa, Homo sapiens
  SITE (12): Xaa equals any amino acid
MSFWTSWMWCAX

SEQ ID NO: 5247 - protein, 62 aa, Homo sapiens
  SITE (12): Xaa equals any amino acid
MSFWTSWMWCAXLARSAPDSHAPARCGRPGHPAQPAAAELPALQLVRPGREAGVQVRVPGAG

SEQ ID NO: 5248 - protein, 189 aa, Homo sapiens
MGPVRLGILLFLFLAVHEAWAGMLKEEDDDTERLPSKCEVCKLLSTELQAELSRTGRSREVLELGQVLDTGKRKRHVPYSVSETRLEEALENLCERILDYSVHAERKGSLRYAKGQSQTMATLKGLVQKGVKVDLGIPLELWDEPSVEVTYLKKQCETMLEEEEEEEEEEGGDKMTKTGSHPKLDREDL

SEQ ID NO: 5249 - protein, 246 aa, Homo sapiens
MGPVRLGMLLFILAVYGAWVATPKEEDDDTERLPSKCEVCKLLSLELQEKLSRTGRSREVLELGQVLDTGKRKRHIPYSVSETRLEEALENLCDRILDYSVHAERKGSLRYAKGQSQTMATLKGLVQKGVKVDLGIPLELWDEPSVEVTFLKKQCETMLEEFEDVVGDWYFHHQEQPLQHFLCEGHVLPPAETACLQETWTGKEKITDGQEKTEGEEEHDQEEEEEEEEEERINTPGHSKHDPEDL

SEQ ID NO: 5250 - protein, 18 aa, Homo sapiens
LGSLIFLLVDLKSWCSLA

SEQ ID NO: 5251 - protein, 291 aa, Homo sapiens
GVAKNSRGRCYLEEAGRTWEPKETGPSPTSALPFPSRPDPAMSAAVRTEPLRGEPPLLVRGDPYSVVVLLQGYAEPEGVDDAVRADGSVTLVLPQAWGSATSLQESPPHSGGAKTALEEAARGPILVDTGGPWAREALLGALAGQGMAPGDVTLVVGTHGHSDHIGNLGLFPGAALLVSHDFCLPGGRYLPHGLGEERPLQLGPGLEVWATPGHGGQRDVSVVVAGTALGTVVVAGDVFERSGDEDSWQALSEDPVAQERSRKRVLDTADVVVPGHGAPFRVVREAPQPRN

SEQ ID NO: 5252 - protein, 37 aa, Homo sapiens
  SITE (28): Xaa equals any amino acid
MVELTLIHITIYLYCLGMCGCSSVGEIXCQCSPAVKI

SEQ ID NO: 5253 - protein, 9 aa, Homo sapiens
YCFCLGSKF

SEQ ID NO: 5254 - protein, 453 aa, Homo sapiens
  SITE (56): Xaa equals any amino acid
  SITE (117): Xaa equals any amino acid
  SITE (133): Xaa equals any amino acid
  SITE (245): Xaa equals any amino acid
  SITE (358): Xaa equals any amino acid
  SITE (411): Xaa equals any amino acid
MKLLVILIFSGLITCCGGNSSHSLPSKLLLVSFDGFRADYLQNYEFPHLQNFIKEXVLVEHVKNVFITKTFPNHYSIVTGLYEESHGIVANSMYDVITKKHFSDFDDKDPFWWNEAXPIWVTNQLQENRSSAXAMWPGTDVPIHNTTPSYFMNYSSSVSFEERLNNITMWLMNSNPPVTFATLYWEEPDASGHKYGPEDKENMYRVLKEVDDLIGELVHKLKVLGLWENLNVIITSDHGMTQCSXDKLINLDLCIDRSSYTLVDLTPVAAVLPKINTTEVYNKLKVCNPHMNVYLKEDIPARFHYQHNDRIQPIILVADEGWTIVLNKSLPKLGDHGYDNSLSSMHPFLAAHGPAFHXGYKHSTINSVDIYPMMCHILGLKPHPNNGTFGHTKCLLVDQWCINLPEAIGIXIGALLVLTTLTCLIIIMQNRLSVPRPFSRLQLQEDDDDPLIE

SEQ ID NO: 5255 - protein, 453 aa, Homo sapiens; identical to SEQ ID NO: 3714

SEQ ID NO: 5256 - protein, 349 aa, Homo sapiens
AVFVVLLALVAGVLGNEFSILKSPGSVVFRNGNWPIPGERIPDVAALSMGFSVKEDLSWPGLAVGNLFHRPRATVMVMVKGVNKLALPPGSVISYPLENAVPFSLDSVANSIHSLFSEETPVVLQLAPSEERVYMVGKANSVFEDLSVTLRQLRNRLFQENSVLSSLPLNSLSRNNEVDLLFLSELQVLHDISSLLSRHKHLAKDHSPDLYSLELAGLDEIGKRYGEDSEQFRDASKILVDALQKFADDMYSLYGGNAVVELVTVKSFDTSLIRKTRTILEAKQAKNPASPYNLAYKYNFEYSVVFNMVLWIMIALALAVIITSYNIWNMDPGYDSIIYRMTNQKIRMD

SEQ ID NO: 5257 - protein, 351 aa, Homo sapiens
  SITE (307): Xaa equals any amino acid
  SITE (331): Xaa equals any amino acid
MAALVVLLSLLAAGVLGNEFSILRSPGSVVFRDGNWPIPGERIPDVAALSMGFSVKEDLSWPGLAVGNLFHRPRATVMVMVKGVDKLALPPGRVISYPLENAVPFSLDSVANSIHSLFSEETPVVLQLAPSEERVYMVGKANSVFEDLSVTLRQLRNRLFQENSVLNSLPLNSLSRNSEVDLLFLSELQVLHDISSLLSRHKHLAKDHSPDLYSLELAGLDEIGKHYGEDSEQFRDASKILVDALQKFADDMYNLYGGNAVVELVTVRSFDTSLVRKTRTILEAKQAKSPSSPYNLAYKYNLEYAVXFNMVLWIMIALALAVIITSYNIWXMDPGYDSIIYRMTNQKIRMD

SEQ ID NO: 5258 - protein, 92 aa, Homo sapiens; identical to SEQ ID NO: 3716

SEQ ID NO: 5259 - protein, 20 aa, Homo sapiens
SLMQISECFTLTVDLESVLQ

SEQ ID NO: 5260 - protein, 185 aa, Homo sapiens
GPPGPPRLPPPKPPRSMPRPPRKPPLSPPRPPLNIPPGPPRSMRPPLPPRMPPGPPLPRSPPGGGKGGGRKPSGFGALHWLHSVLQAKFWFPQPGLGHCQSPARCWTFPPPEGFPREPRGPLGGKPPLSPPRPPMRPMGPPGPPGPPGPPRSGGGMPLPSRGGRPPRILFIGGFFRARETLSLLP

SEQ ID NO: 5261 - protein, 52 aa, Homo sapiens
PAELHSCPQFNPLLPSVPPDLHPARERGGRAPEQFLHHKPDGRAAANSRQQR

SEQ ID NO: 5262 - protein, 499 aa, Homo sapiens
  SITE (4): Xaa equals any amino acid
  SITE (5): Xaa equals any amino acid
  SITE (8): Xaa equals any amino acid
FPLXXLSXSSAGLFQTSASPNQVTFQPRPTLRQSPEADRGRRAEDSRVRFASSGVGGRTLKYCRSQDPPGRTQTTMRAPGCGRLVLPLLLLAAAALAEGDAKGLKEGETPGNFMEDEQWLSSISQYSGKIKHWNRFRDEVEDDYIKSWEDNQQGDEALDTTKDPCQKVKCSRHKVCIAQGYQRAMCISRKKLEHRIKQPTVKLHGNKDSICKPCHMAQLASVCGSDGHTYSSVCKLEQQACLSSKQLAVRCEGPCPCPTEQAATSTADGKPETCTGQDLADLGDRLRDWFQLLHENSKQNGSASSVAGPASGLDKSLGASCKDSIGWMFSKLDTSADLFLDQTELAAINLDKYEVCIRPFFNSCDTYKDGRVSTAEWCFCFWREKPPCLAELERIQIQEAAKKKPGIFIPSCDEDGYYRKMQCDQSSGDCWCVDQLGLELTGTRTHGSPDCDDIVGFSGDFGSGVGWEDEEEKETEEAGEEAEEEEGEAGEADDGGYIW

SEQ ID NO: 5263 - protein, 8 aa, Homo sapiens
LLLLWCLK

SEQ ID NO: 5264 - protein, 36 aa, Homo sapiens
MKIFLPVLLAALLGLERSQLADVLLLLEPERAICTA

SEQ ID NO: 5265 - protein, 244 aa, Homo sapiens
MKKLMVVLSLIAAAWAEEQNKLVHGGPCDKTSHPYQAALYTSGHLLCGGVLIHPLWVLTAAHCKKPNLQVFLGKHNLRQRESSQEQSSVVRAVIHPDYDAASHDQDIMLLRLARPAKLSELIQPLPLERDCSANTTSCHILGWGKTADGDFPDTIQCAYIHLVSREECEHAYPGQITQNMLCAGDEKYGKDSCQGDSGGPLVCGDHLRGLVSWGNIPCGSKEKPGVYTNVCRYTNWIQKTIQAK

SEQ ID NO: 5266 - protein, 53 aa, Homo sapiens
SALAAAWTQQAPGPCPAPCGHRSRLSAFSFCCWRLPVLGPGDTRHAPQCSRTC

SEQ ID NO: 5267 - protein, 4 aa, Homo sapiens
MCLA

SEQ ID NO: 5268 - protein, 238 aa, Homo sapiens
  SITE (208): Xaa equals any amino acid
  SITE (210): Xaa equals any amino acid
  SITE (229): Xaa equals any amino acid
MARARLAPAGIPAVALWLLCTLGLQGTQAGPPPAPPGLPAGADCLNSFTAGVPGFVLDTNASVSNGATFLESPTVRRGWDCVRACCTTQNCNLALVELQPDRGEDAIAACFLINCLYEQNFVCKFAPREGFINYLTREVYRSYRQLRTQGFGGSGIPKAWAGIDLKVQPQEPLVLKDVENTDWRLLRGDTDVRVERKDPNQVGTGGDXKXRHLTWFQVDKGTNFKNHPXGTRGQKVNK

SEQ ID NO: 5269 - protein, 172 aa, Homo sapiens
  SITE (69): Xaa equals any amino acid
  SITE (150): Xaa equals any amino acid
  SITE (154): Xaa equals any amino acid
  SITE (169): Xaa equals any amino acid
CILACRGVQGGPLRGSSGAQATFPQGPSMERRHPVCSGTCQPTQFRCSNGCCIDSFLECDDTPNCPDAXDEAACEKYTSGFDELQRIHFPSDKGHCVDLPDTGLCKESIPRWYYNPFSEHCARFTYGGCYGNKNNFEEEQQCLESCRGIXKKDXFGLRREIPIPSTGSXENG

SEQ ID NO: 5270 - protein, 30 aa, Homo sapiens
RTRGRTRGRTRGVRALLGALLYRMRASELP

SEQ ID NO: 5271 - protein, 18 aa, Homo sapiens
RVGKIMLVTIRPNMCIVK

SEQ ID NO: 5272 - protein, 47 aa, Homo sapiens
LFGFVLFWALLVLMFFLGLAGLGAGVFPFGLGGLLRLVRPAVFLSCP

SEQ ID NO: 5273 - protein, 757 aa, Homo sapiens; identical to SEQ ID NO: 3731

SEQ ID NO: 5274 - protein, 774 aa, Homo sapiens
  SITE (102): Xaa equals any amino acid
MERPLCSHLCSCLAMLALLSPLSLAQYDSWPHYPEYFQQPAPEYHQPQAPANVAKIQLRLAGQKRKHSEGRVEVYYDGQWGTVCDDDFSIHAAHVVCRELGXVEAKSWTASSSYGKGEGPIWLDNLHCTGNEATLAACTSNGWGVTDCKHTEDVGVVCSDKRIPGFKFDNSLINQIENLNIQVEDIRIRAILSTYRKRTPVMEGYVEVKEGKTWKQICDKHWTAKNSRVVCGMFGFPGERTYNTKVYKMFASRRKQRYWPFSMDCTGTEAHISSCKLGPQVSLDPMKNVTCENGLPAVVSCVPGQVFSPDGPSRFRKAYKPEQPLVRLRGGAYIGEGRVEVLKNGEWGTVCDDKWDLVSASVVCRELGFGSAKEAVTGSRLGQGIGPIHLNEIQCTGNEKSIIDCKFNAESQGCNHEEDAGVRCNTPAMGLQKKLRLNGGRNPYEGRVEVLVERNGSLVWGMVCGQNWGIVEAMVVCRQLGLGFASNAFQETWYWHGDVNSNKVVMSGVKCSGTELSLAHCRHDGEDVACPQGGVQYGAGVACSETAPDLVLNAEMVQQTTYLEDRPMFLLQCAMEENCLSASAAQTDPTTGYRRLLRFSSQIHNNGQSDFRPKNGRHAWIWHDCHRHYHSMEVFTHYDLLNLNGTKVAEGHKASFCLEDTECEGDIQKNYECANFGDQGITMGCWDMYRHDIDCQWVDITDVPPGDYLFQVVINPNFEVAESDYSNNIMKCRSRYDGHRIWMYNCHIGGSFSEETEKKFEHFSGLLNNQLSPQ

SEQ ID NO: 5275 - protein, 105 aa, Homo sapiens
GLLTLAILDIECSFRAQFGCDFPRFRFTVTVCTISCAGKVFSTTDVNSSSELSFICATCSTTGVGSLFASRNNSTDAFSKMSLGYCTVLFCPVFGELKAFFFFFV

SEQ ID NO: 5276 - protein, 105 aa, Homo sapiens
  SITE (55): Xaa equals any amino acid
GLLTLAILDIECSFRAQFGCDFPRFRFTVTVCTISCAGKVFSTTDVNSSSELSFXCATCSTTGVGSLFASRNNSTDAFSKMSLGYCTVLFCPVFGELKAFFFFFV

SEQ ID NO: 5277 - protein, 19 aa, Homo sapiens
ECCETAAPPGPHRRPESGQ

SEQ ID NO: 5278 - protein, 135 aa, Homo sapiens
  SITE (4): Xaa equals any amino acid
  SITE (13): Xaa equals any amino acid
SCAXRQVFCQTRXGITLPSEQCSALPRPVSTQNCWSEACSVHWRVSLWTLCTATCGNYGFQSRRVECVHARTNKAVPEHLCSWGPRPANWQRCNITPCENMECRDTTRYCEKVKQLKLCQLSQFKSRCCGTCGKA

SEQ ID NO: 5279 - protein, 1587 aa, Homo sapiens
  SITE (512): Xaa equals any amino acid
  SITE (1181): Xaa equals any amino acid
  SITE (1244): Xaa equals any amino acid
MECCRRATPGTLLLFLAFLLLSSRTARSEEDRDGLWDAWGPWSECSRTCGGGASYSLRRCLSSKSCEGRNIRYRTCSNVDCPPEAGDFRAQQCSAHNDVKHHGQFYEWLPVSNDPDNPCSLKCQAKGTTLVVELAPKVLDGTRCYTESLDMCISGLCQIVGCDHQLGSTVKEDNCGVCNGDGSTCRLVRGQYKSQLSATKSDDTVVAIPYGSRHIRLVLKGPDHLYLETKTLQGTKGENSLSSTGTFLVDNSSVDFQKFPDKEILRMAGPLTADFIVKIRNSGSADSTVQFIFYQPIIHRWRETDFFPCSATCGGGYQLTSAECYDLRSNRVVADQYCHYYPENIKPKPKLQECNLDPCPARWEATPWTACSSSCGGGIQSRAVSCVEEDIQGHVTSVEEWKCMYTPKMPIAQPCNIFDCPKWLAQEWSPCTVTCGQGLRYRVVLCIDHRGMHTGGCSPKTKPHIKEECIVPTPCYKPKEKLPVEAKLPWFKQAQELEEGAAVSEEPSFIPXAWSACTVTCGVGTQVRIVRCQVLLSFSQSVADLPIDECEGPKPASQRACYAGPCSGEIPEFNPDETDGLFGGLQDFDELYDWEYEGFTKCSESCGGGVQEAVVSCLNKQTREPAEENLCVTSRRPPQLLKSCNLDPCPARWEIGKWSPCSLTCGVGLQTRDVFCSHLLSREMNETVILADELCRQPKPSTVQACNRFNCPPAWYPAQWQPCSRTCGGGVQKREVLCKQRMADGSFLELPETFCSASKPACQQACKKDDCPSEWLLSDWTECSTSCGEGTQTRSAICRKMLKTGLSTVVNSTLCPPLPFSSSIRPCMLATCARPGRPSTKHSPHIAAARKVYIQTRRQRKLHFVVGGFAYLLPKTAVVLRCPARRVRKPLITWEKDGQHLISSTHVTVAPFGYLKIHRLKPSDAGVYTCSAGPAREHFVIKLIGGNRKLVARPLSPRSEEEVLAGRKGGPKEALQTHKHQNGIFSNGSKAEKRGLAANPGSRYDDLVSRLLEQGGWPGELLASWEAQDSAERNTTSEEDPGAEQVLLHLPFTMVTEQRRLDDILGNLSQQPEELRDLYSKHLVAQLAQEIFRSHLEHQDTLLKPSERRTSPVTLSPHKHVSGFSSSLRTSSTGDAGGGSRRPHRKPTILRKISAAQQLSASEVVTHLGQTVALASGTLSXLLHCEAIGHPRPTISWARNGEEVQFSDRILLQPDDSLQILAPVEADVGFYTCNATNALGYDSXSIAVTLAGKPLVKTSRMTVINTEKPAVTVDIGSTIKTVQGVNVTINCQVAGVPEAEVTWFRNKSKLGSPHHLHEGSLLLTNVSSSDQGLYSCRAANLHGELTESTQLLILDPPQVPTQLEDIRALLAATGPNLPSVLTSPLGTQLVLDPGNSALLGCPIKGHPVPNITWFHGGQPIVTATGLTHHILAAGQILQVANLSGGSQGEFSCLAQNEAGVLMQKASLVIQDYWWSVDRLATCSASCGNRGVQQPRLRCLLNSTEVNPAHCAGKVRPAVQPIACNRRDCPSRWMVTSWSACTRSCGGGVQTRRVTCQKLKASGISTPVSNDMCTQVAKPAVDTQACNQ

SEQ ID NO: 5280 - protein, 191 aa, Homo sapiens
MECCRRATPGTLLLFLAFLLLSSRTARSEEDRDGLWDAWGPWSECSRTCGGGASYSLRRCLSSKSCEGRNIRYRTCSNVDCPPEAGDFRAQQCSAHNDVKHHGQFYEWLPVSNDPDNPCSLKCQAKGTTLVVELAPKVLDGTRCYTESLDMCISGLCQIVGCDHQLGSTVRKIMWGLQRRWVHLPAGPRAV

SEQ ID NO: 5281 - protein, 1745 aa, Homo sapiens
MECCRRATPGTLLLFLAFLLLSSRTARSEEDRDGLWDAWGPWSECSRTCGGGASYSLRRCLSSKSCEGRNIRYRTCSNVDCPPEAGDFRAQQCSAHNDVKHHGQFYEWLPVSNDPDNPCSLKCQAKGTTLVVELAPKVLDGTRCYTESLDMCISGLCQIVGCDHQLGSTVKEDNCGVCNGDGSTCRLVRGQYKSQLSATKSDDTVVAIPYGSRHIRLVLKGPDHLYLETKTLQGTKGENSLSSTGTFLVDNSSVDFQKFPDKEILRMAGPLTADFIVKIRNSGSADSTVQFIFYQPIIHRWRETDFFPCSATCGGGYQLTSAECYDLRSNRVVADQYCHYYPENIKPKPKLQECNLDPCPARWEATPWTACSSSCGGGIQSRAVSCVEEDIQGHVTSVEEWKCMYTPKMPIAQPCNIFDCPKWLAQEWSPCTVTCGQGLRYRVVLCIDHRGMHTGGCSPKTKPHIKEECIVPTPCYKPKEKLPVEAKLPWFKQAQELEEGAAVSEEPSFIPKAWSACTVTCGVGTQVRIVRCQVLLSFSQSVADLPIDECEGPKPASQRACYAGPCSGEIPEFNPDETDGLFGGLQDFDELYDWEYEGFTKCSESCGGGVQEAVVSCLNKQTREPAEENLCVTSRRPPQLLKSCNLDPCPARWEIGKWSPCSLTCGVGLQTRDVFCSHLLSREMNETVILADELCRQPKPSTVQACNRFNCPPAWYPAQWQPCSRTCGGGVQKREVLCKQRMADGSFLELPETFCSASKPACQQACKKDDCPSEWLLSDWTECSTSCGEGTQTRSAICRKMLKTGLSTVVNSTLCPPLPFSSSIRPCMLATCARPGRPSTKHSPHIAAARKVYIQTRRQRKLHFVVGGFAYLLPKTAVVLRCPARRVRKPLITWEKDGQHLISSTHVTVAPFGYLKIHRLKPSDAGVYTCSAGPAREHFVIKLIGGNRKLVARPLSPRSEEEVLAGRKGGPKEALQTHKHQNGIFSNGSKAEKRGLAANPGSRYDDLVSRLLEQGGWPGELLASWEAQDSAERNTTSEEDPGAEQVLLHLPFTMVTEQRRLDDILGNLSQQPEELRDLYSKHLVAQLAQEIFRSHLEHQDTLLKPSERRTSPVTLSPHKHVSGFSSSLRTSSTGDAGGGSRRPHRKPTILRKISAAQQLSASEVVTHLGQTVALASGTLSVLLHCEAIGHPRPTISWARNGEEVQFSDRILLQPDDSLQILAPVEADVGFYTCNATNALGYDSVSIAVTLAGKPLVKTSRMTVINTEKPAVTVDIGSTIKTVQGVNVTINCQVAGVPEAEVTWFRNKSKLGSPHHLHEGSLLLTNVSSSDQGLYSCRAANLHGELTESTQLLILDPPQVPTQLEDIRALLAATGPNLPSVLTSPLGTQLVLDPGNSALLGCPIKGHPVPNITWFHGGQPIVTATGLTHHILAAGQILQVANLSGGSQGEFSCLAQNEAGVLMQKASLVIQDYWWSVDRLATCSASCGNRGVQQPRLRCLLNSTEVNPAHCAGKVRPAVQPIACNRRDCPSRWMVTSWSACTRSCGGGVQTRRVTCQKLKASGISTPVSNDMCTQVAKRPVDTQACNQQLCVEWAFSSWGQCNGPCIGPHLAVQHRQVFCQTRDGITLPSEQCSALPRPVSTQNCWSEACSVHWRVSLWTLCTATCGNYGFQSRRVECVHARTNKAVPEHLCSWGPRPANWQRCNITPCENMECRDTTRYCEKVKQLKLCQLSQFKSRCCGTCGKA

SEQ ID NO: 5282 - protein, 14 aa, Homo sapiens
WWWCWLWWLLLPMG

SEQ ID NO: 5283 - protein, 47 aa, Homo sapiens
CLCLFFLHSLSKCPDLPQFQFFFCYPGFNNNRASLLGRFWSLWPQCT

SEQ ID NO: 5284 - protein, 149 aa, Homo sapiens
  SITE (148): Xaa equals any amino acid
MATVKKVMGGEKQSRKDHLKHKQMGKLNRQSQYHHICFKNSTPTPFQSASLHCTIVEEMEEQDGFGWLESHLGEAGQVGNATGVVLISSHEDISFVSPVFSPAVFNYPARAEFLQPGGSTSSRAAATAVELQLLFPLVRVNFELAYNXS

SEQ ID NO: 5285 - protein, 103 aa, Homo sapiens; identical to SEQ ID NO: 3739

SEQ ID NO: 5286 - protein, 103 aa, Homo sapiens; identical to SEQ ID NO: 3739

SEQ ID NO: 5287 - protein, 248 aa, Homo sapiens; identical to SEQ ID NO: 3744

SEQ ID NO: 5288 - protein, 248 aa, Homo sapiens; identical to SEQ ID NO: 3744

SEQ ID NO: 5289 - protein, 79 aa, Homo sapiens
GSFKNVKTFKNDNSREFLDYSKCLLLNCAQQAGCVKKPKYFEKTRTDLTRVASLESSNLPMCLPIWGLVFLFFFQINGS

SEQ ID NO: 5290 - protein, 35 aa, Homo sapiens; identical to SEQ ID NO: 3745

SEQ ID NO: 5291 - protein, 52 aa, Homo sapiens
HASEQEKMLTLIYLNGTWRPGMWLTLVIPAPWKAEAGGSPEVRSSRPAWPTW

SEQ ID NO: 5292 - protein, 39 aa, Homo sapiens
ASAVLSWKLAKMIEAREKEQKKKQKRQENIAKAKRLKKD

SEQ ID NO: 5293 - protein, 1 aa, Homo sapiens
M

SEQ ID NO: 5294 - protein, 268 aa, Homo sapiens
MLGITVLAALLACASSCGVPSFPPNLSARVVGGEDARPHSWPWQISLQYLKNDTWRHTCGGTLIANNFVLTAAHCISNTRTYRVSVGKNNLEVEDEEGSLFVGVDTIHVHKRWNALLLRNDIALIKLAEHVELSDTIQVACLPEKDSLLPKDYPCYVTGWGRLWTNGPIADKLQQGLQPVVDHATCSRIDWWGFRVKKTMVCAGGDGVISACNGDSGGPLNCQLENGSWEVFGIVSFGSRRGCNTRKKPVVYTRVSAYIDWINEKMQL

SEQ ID NO: 5295 - protein, 351 aa, Homo sapiens
TWCTTTMLAARLVCLRTLPSRVFHPAFTKASPVVKNSITKNQWLLTPSREYATKTRIGIRRGRTGQELKEAALEPSMEKIFKIDQMGRWFVAGGAAVGLGALCYYGLGLSNEIGAIEKAVIWPQYVKDRIHSTYMYLAGSIGLTALSAIAISRTPVLMNFMMRGSWVTIGVTFAAMVGAGMLVRSIPYDQSPGPKHLAWLLHSGVMGAVVAPLTILGGPLLIRAAWYTAGIVGGLSTVAMCAPSEKFLNMGAPLGVGLGLVFVSSLGSMFLPPTTVAGATLYSVAMYGGLVLFSMFLLYDTQKVIKRAEVSPMYGVQKYDPINSMLSIYMDTLNIFMRVATMLATGGNRKK

SEQ ID NO: 5296 - protein, 405 aa, Homo sapiens
  SITE (148): Xaa equals any amino acid
MDTIFLWSLLLLFFGSQASRCSAQKNTEFAVDLYQEVSLSHKDNIIFSPLGITLVLEMVQLGAKGKAQQQIRQTLKQQETSAGEEFFVLKSFFSAISEKKQEFTFNLANALYLQEGFTVKEQYLHGNKEFFQSAIKLVDFQDAKACAXMISTWVERKTDGKIKDMFSGEEFGPLTRLVLVNAIYFKGDWKQKFRKEDTQLINFTKKNGSTVKIPMMKALLRTKYGYFSESSLNYQVLELSYKGDEFSLIIILPAEGMDIEEVEKLITAQQILKWLSEMQEEEVEISLPRFKVEQKVDFKDVLYSLNITEIFSGGCDLSGITDSSEVYVSQVTQKVFFEINEDGSEAATSTGIHIPVIMSLAQSQFIANHPFLFIMKHNPTESILFMGRVTNPDTQEIKGRDLDSL

SEQ ID NO: 5297 - protein, 68 aa, Homo sapiens; identical to SEQ ID NO: 3751

SEQ ID NO: 5298 - protein, 68 aa, Homo sapiens; identical to SEQ ID NO: 3751

SEQ ID NO: 5299 - protein, 24 aa, Homo sapiens
RLLATGVGALVFPPAHAVAVVRPG

SEQ ID NO: 5300 - protein, 24 aa, Homo sapiens
RLLATGVGALVFPPAHAVAVVRPG

SEQ ID NO: 5301 - protein, 53 aa, Homo sapiens; identical to SEQ ID NO: 4741
  SITE (26): Xaa equals any amino acid

SEQ ID NO: 5302 - protein, 145 aa, Homo sapiens
MGHNVLPLFMPVFLFFVFPGYSIFCILPCLVLDIFVNLYISLHLFLECDQVTWKKKKKKNSRGGPVPNSPYSESYYNSLAVVLQRRDWENPALPNLIALQHIPLSPAGVIAKRPDRSPFQQLRSLNGEWQIVSVNILVKFALNFW

SEQ ID NO: 5303 - protein, 300 aa, Homo sapiens; identical to SEQ ID NO: 4601

SEQ ID NO: 5304 - protein, 177 aa, Homo sapiens; identical to SEQ ID NO: 3257

SEQ ID NO: 5305 - protein, 406 aa, Homo sapiens
MHPAVFLSLPDLRCSLLLLVTWVFTPVTTEITSLDTENIDEILNNADVALVNFYADWCRFSQMLHPIFEEASDVIKEEFPNENQVVFARVDCDQHSDIAQRYRISKYPTLKLFRNGMMMKREYRGQRSVKALADYIRQQKSDPIQEIRDLAEITTLDRSKRNIIGYFEQKDSDNYRVFERVANILHDDCAFLSAFGDVSKPERYSGDNIIYKPPGHSAPDMVYLGAMTNFDVTYNWIQDKCVPLVREITFENGEELTEEGLPFLILFHMKEDTESLEIFQNEVARQLISEKGTINFLHADCDKFRHPLLHIQKTPADCPVIAIDSFRHMYVFGDFKDVLIPGKLKQFVFDLHSGKLHREFHHGPDPTDTAPGEQAQDVASSPPESSFQKLAPSEYRYTLLRDRDEL

SEQ ID NO: 5306 - protein, 66 aa, Homo sapiens
  SITE (49): Xaa equals any amino acid
TILLLINWHLVPPVTLGCGLLNRSLSPNTNQAARSSAAAGQMMVSTWRXGCSMGSSAYGTKMARRK

SEQ ID NO: 5307 - protein, 319 aa, Homo sapiens
MHPAVFLSLPDLRCSLLLLVTWVFTPVTTEITSLDTENIDEILNNADVALVNFYADWCRFSQMLHPIFEEASDVIKEEFPNENQVVFARVDCDQHSDIAQRYRISKYPTLKLFRNGMMMKREYRGQRSVKALADYIRQQKSDPIQEIRDLAEITTLDRSKRNIIGYFEQKDSDNYRVFERVANILHDDCAFLSAFGDVSKPERYSGDNIIYKPPGHSAPDMVYLGAMTNFDVTYNWIQDKCVPLVREITFENGEELTEEGLPFLILFHMKEDTESLEIFQNEVARQLISEKGTINFYMPIVTNLDILFCTYRKLQQIVL

SEQ ID NO: 5308 - protein, 190 aa, Homo sapiens
MKASQCCCCLSHLLASVLLLLLLPELSGPLAVLLQAAEAAPGLGPPDPRPRTLPPLPPGPTPAQQPGRGLAEAAGPRGSEGGNGSNPVAGLETDDHGGKAGEGSVGGGLAVSPNPGDKPMTQRALTVLMVVSGAVLVYFVVRTVRMRRRNRKTRRYGVLDTNIENMELTPLEQDDEDDDNTLFDANHPRR

SEQ ID NO: 5309 - protein, 190 aa, Homo sapiens; identical to SEQ ID NO: 5308

SEQ ID NO: 5310 - protein, 214 aa, Homo sapiens
MVLGGCPVSYLLLCGQAALLLGNLLLLHCVSRSHSQNATAEPELTSAGAAQPEGPGGAASWEYGDPHSPVILCSYLPDEFIECEDPVDHVGNATASQELGYGCLKFGGQAYSDVEHTSVQCHALDGIECASPRTFLRENKPCIKYTGHYFITTLLYSFFLGCFGVDRFCLGHTGTAVGKLLTLGGLGIWWFVDLILLITGGLMPSDGSNWCTVY

SEQ ID NO: 5311 - protein, 10 aa, Homo sapiens
KQGALGLCIS

SEQ ID NO: 5312 - protein, 358 aa, Homo sapiens
  SITE (17): Xaa equals any amino acid
MGAVWSALLVGGGLAGXLFVWLLRGGPGDTGKDGDAEQEKDAPLGGAAIPGGHQSGSSGLSPGPSGQELVTKPEHLQESNGHLISKTKDLGKLQAASWRLQNPSREVCDNSREHVPSGQFPDTEAPATSETSNSRSYSEVSRNESLESPMGEWGFQKGQEISAKAATCFAEKLPSSNLLKNRAKEEMSLSDLNSQDRVDHEEWEMVPRHSSWGDVGVGGSLKAPVLNLNQGMDNGRSTLVEARGQQVHGKMERVAVMPAGSQQVSVRFQVHYVTSTDVQFIAVTGDHECLGRWNTYIPLHYNKDGFWSHSIFLPADTVVEWKFVLVENGGVTRWEECSNRFLETGHEDKVVHAWWGIH

SEQ ID NO: 5313 - protein, 123 aa, Homo sapiens; identical to SEQ ID NO: 3764

SEQ ID NO: 5314 - protein, 201 aa, Homo sapiens [sequence omitted]

SEQ ID NO: 5315 - protein, 176 aa, Homo sapiens
  SITE (37): Xaa equals any amino acid
MWTELENQARPERFQNCKDLFDLILTCEERVYDQVVXDLNSRDRRPASPCTWSMWTSRTTTRRPPWGRFSSVSSASVSSTRKTWRTRSTSCCRSSRRRVAAPFCTPSASTEPSARMEPPLELPVVHTFSFLTFVFTYRCSAGDGSITQINCAYEMGEEMPKRQMKAIKFLLFHFYL

SEQ ID NO: 5316 - protein, 201 aa, Homo sapiens [sequence omitted]

SEQ ID NO: 5317 - protein, 60 aa, Homo sapiens
NFFQLLFFFFFKVKSRGLLGQRKRIALCCREGSWRNGLPQLSYLNGYPSDFNFIFSLRAW

SEQ ID NO: 5318 - protein, 61 aa, Homo sapiens; identical to SEQ ID NO: 3767

SEQ ID NO: 5319 - protein, 261 aa, Homo sapiens
  SITE (260): Xaa equals any amino acid
MPLPWSLALPLLLSWVAGGFGNAASARHHGLLASARQPGVCHYGTKLACCYGWRRNSKGVCEATCEPGCKFGECVGPNKCRCFPGYTGKTCSQDVNECGMKPRPCQHRCVNTHGSYKCFCLSGHMLMPDATCVNSRTCAMINCQYSCEDTEEGPQCLCPSSGLRLAPNGRDCLDIDECASGKVICPYNRRCVNTFGSYYCKCHIGFELQYISGRYDCIDINECTMDSHTCSHHANCFNTQGSFKCKCKQGYKGNGLRCSXK

SEQ ID NO: 5320 - protein, 99 aa, Homo sapiens
  SITE (2): Xaa equals any amino acid
  SITE (5): Xaa equals any amino acid
  SITE (56): Xaa equals any amino acid
  SITE (97): Xaa equals any amino acid
MXLPXSLALPLLLSWVAGGFGNAASARHHGLLASARQPGVCHYGTKLACCYGWRRXSKGVCEATCEPGCKFGECVGPNKCRCFPGYTGKTCSQDVNXCE

SEQ ID NO: 5321 - protein, 36 aa, Homo sapiens
  SITE (32): Xaa equals any amino acid
  SITE (34): Xaa equals any amino acid
LPKWLSWVFHSQTCIFKFFVIIISKSSKKKKXGXAP

SEQ ID NO: 5322 - protein, 553 aa, Homo sapiens
MPLPWSLALPLLLSWVAGGFGNAASARHHGLLASARQPGVCHYGTKLACCYGWRRNSKGVCEATCEPGCKFGECVGPNKCRCFPGYTGKTCSQDVNECGMKPRPCQHRCVNTHGSYKCFCLSGHMLMPDATCVNSRTCAMINCQYSCEDTEEGPQCLCPSSGLRLAPNGRDCLDIDECASGKVICPYNRRCVNTFGSYYCKCHIGFELQYISGRYDCIDINECTMDSHTCSHHANCFNTQGSFKCKCKQGYKGNGLRCSAIPENSVKEVLRAPGTIKDRIKKLLAHKNSMKKKAKIKNVTPEPTRTPTPKVNLQPFNYEEIVSRGGNSHGGKKGNEEKMKEGLEDEKREEKALKNDIEERSLRGDVFFPKVNEAGEFGLILVQRKALTSKLEHKDLNISVDCSFNHGICDWKQDREDDFDWNPADRDNAIGFYMAVPALAGHKKDIGRLKLLLPDLQPQSNFCLLFDYRLAGDKVGKLRVFVKNSNNALAWEKTTSEDEKWKTGKIQLYQGTDATKSIIFEAERGKGKTGEIAVDGVLLVSGLCPDSLLSVDD

SEQ ID NO: 5323 - protein, 448 aa, Homo sapiens
MPLPWSLALPLLLSWVAGGFGNAASARHHGLLASARQPGVCHYGTKLACCYGWRRNSKGVCEATCEPGCKFGECVGPNKCRCFPGYTGKTCSQDVNECGMKPRPCQHRCVNTHGSYKCFCLSGHMLMPDATCVNSRTCAMINCQYSCEDTEEGPQCLCPSSGLRLAPNGRDCLDIDECASGKVICPYNRRCVNTFGSYYCKCHIGFELQYISGRYDCIDINECTMDSHTCSHHANCFNTQGSFKCKCKQGYKGNGLRCSAIPENSVKEVLRAPGTIKDRIKKLLAHKNSMKKKAKIKNVTPEPTRTPTPKVNLQPFNYEEIVSRGGNSHGGKKGNEEKMKEGLEDEKREEKALKNDIEERSLRGDVFFPKVNEAGEFGLILVQRKALTSKLEHKDLNISVTAASIMGSVTGNRIEKMILTGNLLIEIMLLASIWQFRPWQVTRKTLAD

SEQ ID NO: 5324 - protein, 448 aa, Homo sapiens; identical to SEQ ID NO: 5323

SEQ ID NO: 5325 - protein, 448 aa, Homo sapiens; identical to SEQ ID NO: 5323

SEQ ID NO: 5326 - protein, 45 aa, Homo sapiens
MLWFANFFTYLFLSQSVAFVHISHIGVRQVNTNCYFSRKSYCYEY

SEQ ID NO: 5327 - protein, 58 aa, Homo sapiens; identical to SEQ ID NO: 3770

SEQ ID NO: 5328 - protein, 30 aa, Homo sapiens
LLKSVTIQSMILQLLRSINILNLKLIFLMP

SEQ ID NO: 5329 - protein, 65 aa, Homo sapiens
  SITE (22): Xaa equals any amino acid
RVDPRVRWRLRWALSYILTQLXSSQGTFLDQNPWETGGTKCNVLAFCKMEICCPAAYLLFSNPSF

SEQ ID NO: 5330 - protein, 51 aa, Homo sapiens
  SITE (15): Xaa equals any amino acid
  SITE (20): Xaa equals any amino acid
  SITE (21): Xaa equals any amino acid
  SITE (29): Xaa equals any amino acid
FKLLPPFLILPKEFXLVLDXXPNRLRVGXPKAGFSAGLHVLLHTHIPSKLI

SEQ ID NO: 5331 - protein, 7 aa, Homo sapiens
NHTTYTI

SEQ ID NO: 5332 - protein, 232 aa, Homo sapiens
MGNEPAYVWLWLGLVKLGCAMACLNYNIRAKSLLHCFQCCGAKVLLVSPELQAAVEEILPSLKKDDVSIYYVSRTSNTDGIDSFLDKVDEVSTEPIPESWRSEVTFSTPALYIYTSGTTGLPKAAMITHQRIWYGTGLTFVSGLKADDVIYITLPFYHSAALLIGIHGCIVAGATLALRTKFSASQFWDDCRKYNVTVIQYIGELLRYLCNSPQKPNDRDHKVRLALGNGLR

SEQ ID NO: 5333 - protein, 7 aa, Homo sapiens
NHTTYTI

SEQ ID NO: 5334 - protein, 335 aa, Homo sapiens
PVHQSAQYSGPGTSLRFLIDISLLEHRLECGANDMKVSLGKCQLKSLGFDKVFMYLSDSRCSGFNDRDNRDWVSVVTPARDGPCGTVLTRNETHATYSNTLYLADEIIIRDLNIKINFACSYPLDMKVSLKTALQPMVSALNIRVGGTGMFTVRMALFQTPSYTQPYQGSSVTLSTEAFLYVGTMLDGGDLSRFALLMTNCYATPSSNATDPLKYFIIQDRCPHTRDSTIQVVENGESSQGRFSVQMFRFAGNYDLVYLHCEVYLCDTMNEKCKPTCSGTRFRSGSVIDQSRVLNLGPITRKGVQATVSRAFSSLGLLKVWLPLLLSATLTLTFQ

SEQ ID NO: 5335 - protein, 148 aa, Homo sapiens
FSYSFKQKQYRILQVTEFSSFYCVLRMCPLDLSIYISRAFLQVLLFVSLGEPRNKDFLTNDCLSLADVSYRNLTISLSVLPTLLRVLTYYHGLDYFCVFSWLPTVLHLQWLILLSSLPEDHKNAFLPLTHPFCVTQYCILTPKPTVYP

SEQ ID NO: 5336 - protein, 122 aa, Homo sapiens [sequence omitted]

SEQ ID NO: 5337 - protein, 54 aa, Homo sapiens
FILLTLSSGCRLLVSSWKTFLPHFSLPGPREHPEGSRTWFFRYWEPGAHCLHCA

SEQ ID NO: 5338 - protein, 85 aa, Homo sapiens [sequence omitted]

SEQ ID NO: 5339 - protein, 85 aa, Homo sapiens [sequence omitted]

SEQ ID NO: 5340 - protein, 76 aa, Homo sapiens
CTATCLPMCLSGNVYHLCACSCVVLDSDNPFSPVLHSNDNSSLTPKPKGKTSSRSNCSALTDTSTLGPASPTASKY

SEQ ID NO: 5341 - protein, 155 aa, Homo sapiens
  SITE (140): Xaa equals any amino acid
  SITE (155): Xaa equals any amino acid
MLSTRLTLLLMVATPALMGVGTLMGSGLRKLSRQCQEQIARAMGVADEALGNVRTVRAFAMEQREEERYGAELEACRCRAEELGRGIALFQGLSNIAFNCMVLGTLFIGGSLVAGQQLTGGDLMSFLVASQTVQSFLRVXPCPNSLPLQAVTLHX

SEQ ID NO: 5342 - protein, 45 aa, Homo sapiens; identical to SEQ ID NO: 3783

SEQ ID NO: 5343 - protein, 45 aa, Homo sapiens; identical to SEQ ID NO: 3783

SEQ ID NO: 5344 - protein, 45 aa, Homo sapiens; identical to SEQ ID NO: 3783

SEQ ID NO: 5345 - protein, 119 aa, Homo sapiens
  SITE (36): Xaa equals any amino acid
  SITE (50): Xaa equals any amino acid
  SITE (57): Xaa equals any amino acid
GSHPGAPGRHVRLLLLVAFALVVVLFHVLLAPITAXFHTHFYDRLQDAGXRWPELYXYSRADEVVLARDIERMVEARLARRVLARSVDFVSSAHVSHLRDYPTYYTSLCVDFMRNCVRC

SEQ ID NO: 5346 - protein, 93 aa, Homo sapiens; identical to SEQ ID NO: 3788

SEQ ID NO: 5347 - protein, 62 aa, Homo sapiens
ERAGHARSCGRRKECQRKQLGLMNFTLAIFHYFSLSQMSVLMRQLALTGATLITTYQPLISG

SEQ ID NO: 5348 - protein, 90 aa, Homo sapiens
HFIPFLGGTGLFILRQGLTLPPRMECSGTITAHCSLELLGSSDPSALASRVSRTTGMYHHTRLIFIFYIFVEMGSCYVPQVGQSVMWYFI

SEQ ID NO: 5349 - protein, 126 aa, Homo sapiens
WIPRAAGIRHEQKPPILMWKPMPSPSNMKASAALLCLLLTAAAFSPQGLAQPVGINTSTTCCYRFINKKIPKQRLESYRRTTSSHCPREAVIFKTKLDKEICADPTQKWVQDFMKHLDKKTQTPKL

SEQ ID NO: 5350 - protein, 45 aa, Homo sapiens
  SITE (2): Xaa equals any amino acid
VXEESGKSAPIRKPAFSPRVGRFINAAGTTGFPTGKRAVSATQLM

SEQ ID NO: 5351 - protein, 1 aa, Homo sapiens
W

SEQ ID NO: 5352 - protein, 121 aa, Homo sapiens
LSFKCLLASRINFFLARCGAHACNPALWEAEVCGSLEIRVQGRPGETLSLLKIQKLARCGGVRLWSQLLRRLRQESCLSPGGGGAVSRDHANCTPAWVTEGDCLKKKKKKLEGGPSQSPIV

SEQ ID NO: 5353 - protein, 172 aa, Homo sapiens
MFTPEVGKVIMALMVMSCCGSLLGWQFTIAQVFKSSSDEGYFPKIFSRVTKVDAPVQGMLTIVIIQSGLALMTISPSLNSQFNVLVNLAVVTNIIPYILSMAALVIIQKVANVPPSKAKVANFVAFVGAMYSFYALYSSGEEAMLYGSIVTFLGWTLYGLVSPRFELKNKHG

SEQ ID NO: 5354 - protein, 104 aa, Homo sapiens
  SITE (69): Xaa equals any amino acid
MFTPEVGKVIMALMVMSCCGSLLGWQFTIAQVFKSSSDEGYFPKIFSRVTKVDAPVQGMLTIVIIQSGXALMTISPSLNSQFNVLVNLAVASSVSSRRLNRNGI

SEQ ID NO: 5355 - protein, 71 aa, Homo sapiens
VDAFLGLFVYMYVVCFFPFVSSLFSVQFIQGYMLFFNASGYAFSLFTYRIWDWGWVGCFCLGTYLVVLSLL

SEQ ID NO: 5356 - protein, 9 aa, Homo sapiens
AILLYQPPK

SEQ ID NO: 5357 - protein, 176 aa, Homo sapiens
  SITE (109): Xaa equals any amino acid
  SITE (128): Xaa equals any amino acid
  SITE (149): Xaa equals any amino acid
VACKPENRTKTHFASSPACDGHALGGQVGFAICFLSCLFPPMGPVWLFCFLTLCRKPSQLFSQENSCMDVAGGVTTCLPPWFSRGAPAQMSQWPPSSDHGAVRAGRDSXVGPVQPSHLTCEGGKEERXKNKKAEVNPPTGMGLANRIPXDDITLKLRNQGKLRTKENRTQSAKRHP

SEQ ID NO: 5358 - protein, 8 aa, Homo sapiens
IKILKTFL

SEQ ID NO: 5359 - protein, 40 aa, Homo sapiens; identical to SEQ ID NO: 3793

SEQ ID NO: 5360 - protein, 176 aa, Homo sapiens
VACKPENRTKTHFASSPACDGHALGGQVGFAICFLSCLFPPMGPVWLFCFLTLCRKPSQLFSQENSCMDVAGGVTTCLPPWFSRGAPAQMSQWPPSSDHGAVRAGRDSRVGPVQPSHLTCEGGKEEREKNKKAEVNPPTGMGLANRIPRDDITLKLRNQGKLRTKENRTQSAKRHP

SEQ ID NO: 5361 - protein, 90 aa, Homo sapiens; identical to SEQ ID NO: 3794

SEQ ID NO: 5362 - protein, 90 aa, Homo sapiens; identical to SEQ ID NO: 3794

SEQ ID NO: 5363 - protein, 111 aa, Homo sapiens
  SITE (79): Xaa equals any amino acid
MFLLLGSLTLSDLLAGAAYAANILLSGPLTLKLSPALWFAREGGVFVALTASVLSLLAIALERSLTMARRGPAPVSSRXRTLAMAAAAWGVSLLLGLLPALGWNCLGRLDA

SEQ ID NO: 5364 - protein, 328 aa, Homo sapiens
  SITE (205): Xaa equals any amino acid
  SITE (263): Xaa equals any amino acid
  SITE (264): Xaa equals any amino acid
  SITE (306): Xaa equals any amino acid
MFLLLGSLTLSDLLAGAAYAANILLSGPLTLKLSPALWFAREGGVFVALTASVLSLLAIALERSLTMARRGPAPVSSRGRTLAMAAAAWGVSLLLGLLPALGWNCLGRLDACSTVLPLYAKAYVLFCVLAFVGILAAICALYARIYCQVRANARRLPARPGTAGTTSTRARRKPRSLALLRTLSVVLLAFVACWGPLFLLLLLDXACPARTCPVLLQADPFLGLAMANSLLNPIIYTLTNRDLRHALLRLVCCGRHSCGRDPXXSQQSASAAEASGGLRRCLPPGLDGSFSGSERSSPQRDGLDTXGSTGSPGAPTAARTLVSEPAAD

SEQ ID NO: 5365 - protein, 812 aa, Homo sapiens
PRVRGRVGGRVGGRVGSGRREHAEERARGPRETAAVAARAEQGRGGSHSHSSALGAPRRVAMLPGLALLLLAAWTARALEVPTDGNAGLLAEPQIAMFCGRLNMHMNVQNGKWDSDPSGTKTCIDTKEGILQYCQEVYPELQITNVVEANQPVTIQNWCKRGRKQCKTHPHFVIPYRCLVGEFVSDALLVPDKCKFLHQERMDVCETHLHWHTVAKETCSEKSTNLHDYGMLLPCGIDKFRGVEFVCCPLAEESDNVDSADAEEDDSDVWWGGADTDYADGSEDKVVEVAEEEEVAEVEEEEADDDEDDEDGDEVEEEAEEPYEEATERTTSIATTTTTTTESVEEVVREVCSEQAETGPCRAMISRWYFDVTEGKCAPFFYGGCGGNRNNFDTEEYCMAVCGSAIPTTAASTPDAVDKYLETPGDENEHAHFQKAKERLEAKHRERMSQVMREWEEAERQAKNLPKADKKAVIQHFQEKVESLEQEAANERQQLVETHMARVEAMLNDRRRLALENYITALQAVPPRPRHVFNMLKKYVRAEQKDRQHTLKHFEHVRMVDPKKAAQIRSQVMTHLRVIYERMNQSLSLLYNVPAVAEEIQDEVDELLQKEQNYSDDVLANMISEPRISYGNDALMPSLTETKTTVELLPVNGEFSLDDLQPWHSFGADSVPANTENEVEPVDARPAADRGLTTRPGSGLTNIKTEEISEVKMDAEFRHDSGYEVHHQKLVFFAEDVGSNKGAIIGLMVGGVVIATVIVITLVMLKKKQYTSIHHGVVEVDAAVTPEERHLSKMQQNGYENPTYKFFEQMQN

SEQ ID NO: 5366 - protein, 751 aa, Homo sapiens; identical to SEQ ID NO: 3797

SEQ ID NO: 5367 - protein, 203 aa, Homo sapiens
MTSILLTYVYFVLSLGPRIMANRKPFQLRGFMIVYNFSLVALSLYIVYEVIFILRKKDGQVTFLHVFHHSVLPWSWWWGVKIAPGGMGSFHAMINSSVHVIMYLYYGLSAFGPVAQPYLWWKKHMTAIQLIQFVLVSLHISQYYFMSSCNYQYPVIIHLIWMYGTIFFMLFSNFWYHSYTKGKRLPRALQQNGAPGIAKVKAN

SEQ ID NO: 5368 - protein, 1 aa, Homo sapiens
L

SEQ ID NO: 5369 - protein, 39 aa, Homo sapiens
  SITE (36): Xaa equals any amino acid
NIWSKNQRFIMTSSLEKRGLICLFLIFRLLEDYLIXIIP

SEQ ID NO: 5370 - protein, 12 aa, Homo sapiens
MIFFVLCIFSPT

SEQ ID NO: 5371 - protein, 12 aa, Homo sapiens
MQSLTCTACVCA

SEQ ID NO: 5372 - protein, 2 aa, Homo sapiens
HG

SEQ ID NO: 5373 - protein, 30 aa, Homo sapiens
  SITE (26): Xaa equals any amino acid
MLYLTRLILILRFHCCFRKKLLFLFXCKNL

SEQ ID NO: 5374 - protein, 49 aa, Homo sapiens [sequence omitted]

SEQ ID NO: 5375 - protein, 115 aa, Homo sapiens
HYRRYACRYRSGIPGSTHASERTQSQLLQMVLQGWKFNGGSLYYFSSVKKSWHEAEQFCVSQGAHLASVASKEEQAFLVEFTSKVYYWIGLTDRGTEGSWRWTDGTPFNAAQNKA

SEQ ID NO: 5376 - protein, 8 aa, Homo sapiens
FFFFFLII

SEQ ID NO: 5377 - protein, 374 aa, Homo sapiens
DDHACAAEDLHQGSVHLARLAVQSHSSVNHWHPAAKRGVAWPWGRMAEAGTGEPSPSVEGEHGTEYDTLPSDTVSLSDSDSDLSLPGGAEVEALSPMGLPGEEDSGPDEPPSPPSGLLPATVQPFHLRGMSSTFSQRSRDIFDCLEGAARRAPSSVAHTSMSDNGGFKRPLAPSGRSPVEGLGRAHRSPASPRVPPVPDYVAHPERWTKYSLEDVTEVSEQSNQATALAFLGSQSLAAPTDCVSSFNQDPSSCGEGRVIFTKPVRGVEARHERKRVLGKVGEPGRGGLGNPATDRGEGPVELAHLAGPGSPEAEEWGSPHGGLQEVEALSGSVHSGSVPGLPPVETVGFHGSRKRSRDHFRNKSSSPEDPGAEV

SEQ ID NO: 5378 - protein, 57 aa, Homo sapiens
FFFFFFLCNLFISILFLHKGKENRSEEAGITLGHSQEVGKRLQPRRMSQAALPWLSW

SEQ ID NO: 5379 - protein, 381 aa, Homo sapiens [sequence omitted]

SEQ ID NO: 5380 - protein, 265 aa, Homo sapiens
  SITE (5): Xaa equals any amino acid
PAPCXVAPETRAVIKWMKRIPFVLSANLHGGELVVSYPFDMTRTPWAARELTPTPDDAVFRWLSTVYAGSNLAMQDTSRRPCHSQDFSVHGNIINGADWHTVPGSMNDFSYLHTNCFEVTVELSCDKFPHENELPQEWENNKDALLTYLEQVRMGIAGVVRDKDTELGIADAVIAVDGINHDVTTAWGGDYWRLLTPGDYMVTASAEGYHSVTRNCRVTFEEGPFPCNFVLTKTPKQRLRELLAAGAKVPPDLRRRLERLRGQKD

SEQ ID NO: 5381 - protein, 13 aa, Homo sapiens
MVLIPFPLCLLTA

SEQ ID NO: 5382 - protein, 513 aa, Homo sapiens
KREKHKDLNKKPTNPALERATFSKMDMFPLTWVFLALYFSRHQVRGQPDPPCGGRLNSKDAGYITSPGYPQDYPSHQNCEWIVYAPEPNQKIVLNFNPHFEIEKHDCKYDFIEIRDGDSESADLLGKHCGNIAPPTIISSGSMLYIKFTSDYARQGAGFSLRYEIFKTGSEDCSKNFTSPNGTIESPGFPEKYPHNLDCTFTILAKPKMEIILQFLIFDLEHDPLQVGEGDCKYDWLDIWDGIPHVGPLIGKYCGTKTPSELRSSTGILSLTFHTDMAVAKDGFSARYYLVHQEPLENFQCNVPLGMESGRIANEQISASSTYSDGRWTPQQSRLHGDDNGWTPNLDSNKEYLQVDLRFLTMLTAIATQGAISRETQNGYYVKSYKLEVSTNGEDWMVYRHGKNHKVFQANNDATEVVLNKLHAPLLTRFVRIRPQTWHSGIALRLELFGCRSQMLPAPTCWGCSQASLQTPRSPPLPPRNTSGAPVQPAWSAAARAGSLESLRPSPVRSGFR

SEQ ID NO: 5383 - protein, 33 aa, Homo sapiens
SVLWSFLGVSVACGPLRYCLVAFCAKLGASAVE

SEQ ID NO: 5384 - protein, 36 aa, Homo sapiens; identical to SEQ ID NO: 3808

SEQ ID NO: 5385 - protein, 19 aa, Homo sapiens
  SITE (18): Xaa equals any amino acid
LLLSFACFTLIREPRGQXT

SEQ ID NO: 5386 - protein, 127 aa, Homo sapiens
  SITE (100): Xaa equals any amino acid
MGTALQWMNLTCLGESLLLLLPCFLCSVGYFLVLWEDLVYLGRVFLSSPTLAPAFSVRLPSTQWRLGGYRLVLFLGYLVILLCYANPYTIIQNLFKDRLXSPFLFCAPSNMSLGTKAAVGLFSLGRA

SEQ ID NO: 5387 - protein, 334 aa, Homo sapiens; identical to SEQ ID NO: 3810

SEQ ID NO: 5388 - protein, 331 aa, Homo sapiens
MKMASSLAFLLLNFHVSLLLVQLLTPCSAQFSVLGPSGPILAMVGEDADLPCHLFPTMSAETMELKWVSSSLRQVVNVYADGKEVEDRQSAPYRGRTSILRDGITAGKAALRIHNVTASDSGKYLCYFQDGDFYEKALVELKVAALGSNLHVEVKGYEDGGIHLECRSTGWYPQPQIQWSNAKGENIPAVEAPVVADGVGLYEVAASVIMRGGSGEGVSCIIRNSLLGLEKTASISIADPFFRSAQPWIAALAGTLPILLLLLAGASYFLWRQQKEITALSSEIESEQEMKEMGYAATEREISLRESLQEELKRKKIQYLTRGEESSVRYQ

SEQ ID NO: 5389 - protein, 334 aa, Homo sapiens; identical to SEQ ID NO: 3810

SEQ ID NO: 5390 - protein, 339 aa, Homo sapiens; identical to SEQ ID NO: 3812

SEQ ID NO: 5391 - protein, 3 aa, Homo sapiens
MNW

SEQ ID NO: 5392 - protein, 195 aa, Homo sapiens
SPGLQEFGTSGGRGACVCASARVSWSFCHHADVHRKHQRAPRLRAGRVPLRAHPAAGAGHRQAPPVHRGARGPGPAHGLRRLQRAVRALQPAQHRQDRRRAEPLLQQAAVRPAGRAPAHQPGQGLHQLLRHERGQCGLEQLHLRLRAAGTHAVCAGSTREPAARCVLGPPTPTFWWGEINGLETKKKKKGRPLAI

SEQ ID NO: 5393 - protein, 146 aa, Homo sapiens; identical to SEQ ID NO: 3818

SEQ ID NO: 5394 - protein, 146 aa, Homo sapiens; identical to SEQ ID NO: 3818

SEQ ID NO: 5395 - protein, 91 aa, Homo sapiens
LLNICWRYPETMQMSRFCLNFCSFYYPLADLACGSYYCGVLMVIFYFSQSFYIYYWNSSVRKSCQFWIYIFNYNKIFRISIDLELKDVKSC

SEQ ID NO: 5396 - protein, 31 aa, Homo sapiens
VFLVLLTLITMLRWCLLGFATVNLLCFPCNY

SEQ ID NO: 5397 - protein, 161 aa, Homo sapiens
MAFVCLAIGCLYTFLISTTFGCTSSSDTEIKVNPPQDFEIVDPGYLGYLYLQWQPPLSLDHFKECTVEYELKYRNIGSETWKTIITKNLHYKDGFGSLTRALKRRYTRFYHGNAQMDQKFKVPGQKLLIGYHHKEFQKLKFRIWIAYITIGNIYSVLGNLA

SEQ ID NO: 5398 - protein, 47 aa, Homo sapiens; identical to SEQ ID NO: 3823

SEQ ID NO: 5399 - protein, 2 aa, Homo sapiens
IS

SEQ ID NO: 5400 - protein, 64 aa, Homo sapiens
  SITE (54): Xaa equals any amino acid
KLVKSLEKQTVILLLFEISTLESLCSQLQKIIFRPANFQISAVLIFSQLRVGFXLFVCLFVFPD

SEQ ID NO: 5401 - protein, 19 aa, Homo sapiens
LKLLPVGVVAAGKQVLLTF

SEQ ID NO: 5402 - protein, 52 aa, Homo sapiens; identical to SEQ ID NO: 3827

SEQ ID NO: 5403 - protein, 49 aa, Homo sapiens
CRGRKKGWENLELDRDQEKPALFMLLFCLKANFRYFLGDFSYFLCLCRF

SEQ ID NO: 5404 - protein, 42 aa, Homo sapiens; identical to SEQ ID NO: 3829

SEQ ID NO: 5405 - protein, 42 aa, Homo sapiens; identical to SEQ ID NO: 3829

SEQ ID NO: 5406 - protein, 78 aa, Homo sapiens
  SITE (61): Xaa equals any amino acid
MPEYMMALLVAMFHSGCRGIAKKQIRFPGSCDLNKRGRWLLCSIKMCVFIWLITVEASLLXFFLSCLSHSLRTHANFV

SEQ ID NO: 5407 - protein, 78 aa, Homo sapiens; identical to SEQ ID NO: 3832

SEQ ID NO: 5408 - protein, 96 aa, Homo sapiens; identical to SEQ ID NO: 3833

SEQ ID NO: 5409 - protein, 298 aa, Homo sapiens; identical to SEQ ID NO: 4001

SEQ ID NO: 5410 - protein, 298 aa, Homo sapiens; identical to SEQ ID NO: 4001

SEQ ID NO: 5411 - protein, 298 aa, Homo sapiens; identical to SEQ ID NO: 4001

SEQ ID NO: 5412 - protein, 298 aa, Homo sapiens; identical to SEQ ID NO: 4001

SEQ ID NO: 5413 - protein, 253 aa, Homo sapiens
MDNRFATAFVIACVLSLISTIYMAASIGTDFWYEYRSPVQENSSDLNKSIWDEFISDEADEKTYNDALFRYNGTVGLWRRCITIPKNMHWYSPPERTESFDVVTKCVSFTLTEQFMEKFVDPGNHNSGIDLLRTYLWRCQFLLPFVSLGLMCFGALIGLCACICRSLYPTIATGILHLLAGLCTLGSVSCYVAGIELLHQKLELPDNVSGEFGWSFCLACVSAPLQFMASALFIWAAHTNRKEYTLMKAYRVA

SEQ ID NO: 5414 - protein, 184 aa, Homo sapiens
MDNRFATAFVIACVLSLISTIYMAASIGTDFWYEYRSPVQENSSDLNKSIWDEFISDEADEKTYNDALFRYNGTVGLWRRCITIPKNMHWYSPPERTESFDVVTKCVSFTLTEQFMEKFVDPGNHNSGIDLLRTYLWRCQFLLPFVSLGLMCFGALIGLCACICRSLYPTIATGILHLLADTML

SEQ ID NO: 5415 - protein, 55 aa, Homo sapiens
TDTVTLVLLKSLTDISTTCFRSHSYSQFSFINLCQVSIHFFLSRPRLVYLKDGIA

SEQ ID NO: 5416 - protein, 253 aa, Homo sapiens; identical to SEQ ID NO: 5413

SEQ ID NO: 5417 - protein, 253 aa, Homo sapiens; identical to SEQ ID NO: 5413

SEQ ID NO: 5418 - protein, 1 aa, Homo sapiens
G

SEQ ID NO: 5419 - protein, 266 aa, Homo sapiens; identical to SEQ ID NO: 3864

SEQ ID NO: 5420 - protein, 266 aa, Homo sapiens
  SITE (138): Xaa equals any amino acid
MWWFQQGLSFLPSALVIWTSAAFIFSYITAVTLHHIDPALPYISDTGTVAPEKCLFGAMLNIAAVLCIATIYVRYKQVHALSPEENVIIKLNKAGLVLGILSCLGLSIVANFQKTTLFAAHVSGAVLTFGMGSLYMFXQTILSYQMQPKIHGKQVFWIRLLVVIWCGVSALSMLTCSSVLHSGNFGTDLEQKLHWNPEDKGYVLHMITTAAEWSMSFSFFGFFLTYIRDFQKISLRVEANLHGLTLYDTAPCPINNERTRLLSRDI

SEQ ID NO: 5421 - protein, 49 aa, Homo sapiens; identical to SEQ ID NO: 3841

SEQ ID NO: 5422 - protein, 113 aa, Homo sapiens; identical to SEQ ID NO: 3842

SEQ ID NO: 5423 - protein, 194 aa, Homo sapiens; identical to SEQ ID NO: 3843

SEQ ID NO: 5424 - protein, 194 aa, Homo sapiens; identical to SEQ ID NO: 3843

SEQ ID NO: 5425 - protein, 45 aa, Homo sapiens
MTMRHNWTPDLSPLWVLLLCAHVVTLLVRATPVSQTTTGPAAAQP

SEQ ID NO: 5426 - protein, 27 aa, Homo sapiens
LQSWWVTVSPGDGGVNNHPRPVGWGED

SEQ ID NO: 5427 - protein, 53 aa, Homo sapiens
DTATDKSAPDHCCLPKMCLISEPISCTTEPEPLARSQLMFRKDESLAAAFPVL

SEQ ID NO: 5428 - protein, 201 aa, Homo sapiens
  SITE (188): Xaa equals any amino acid
  SITE (189): Xaa equals any amino acid
  SITE (191): Xaa equals any amino acid
MLQLWKLVLLCGVLTGTSESLLDNLGNDLSNVVDKLEPVLHEGLETVDNTLKGILEKLKVDLGVLQKSSAWQLAKQKAQEAEKLLNNVISKLLPTNTDIFGLKISNSLILDVKAEPIDDGKGLNLSFPVTANVTVAGPIIGQIINLKASLDLLTAVTIETDPQTHQPVAVLGECASDPTSISLSLLDXXAXSSYKLGSQGT

SEQ ID NO: 5429 - protein, 78 aa, Homo sapiens
VVSCGVFFKKFDLAFIFSILFPIKSMQIICPKLSSSSDSAFVLCQSHFHLLPWFHRSFVSWASRKIKLYLFCICEMFK

SEQ ID NO: 5430 - protein, 71 aa, Homo sapiens
NDVDLVVEGTSRFTYTVLVDGCSKKTNEWGKTIIEYKTNKPSRLPFLDIAPLDIGGADQEFFVDIGPVCFK

SEQ ID NO: 5431 - protein, 58 aa, Homo sapiens
ETDPVVTTAPLWVAESQVTACASWVLSRAFRSKKGLNLVVERLQSSINFIVLGSERRC

SEQ ID NO: 5432 - protein, 65 aa, Homo sapiens
  SITE (4): Xaa equals any amino acid
  SITE (7): Xaa equals any amino acid
MVIXVLXAPWVLLVLGALLVLLALLEKMVALDILVQLDLLAFEALRVTKALLAPLVPLALLDLQV

SEQ ID NO: 5433 - protein, 78 aa, Homo sapiens; identical to SEQ ID NO: 5429

SEQ ID NO: 5434 - protein, 65 aa, Homo sapiens; identical to SEQ ID NO: 3849

SEQ ID NO: 5435 - protein, 65 aa, Homo sapiens; identical to SEQ ID NO: 3849

SEQ ID NO: 5436 - protein, 82 aa, Homo sapiens; identical to SEQ ID NO: 3850

SEQ ID NO: 5437 - protein, 12 aa, Homo sapiens
LQMSLAALLSFL

SEQ ID NO: 5438 - protein, 17 aa, Homo sapiens
SCKIYFLLWRLTVVKEW

SEQ ID NO: 5439 - protein, 28 aa, Homo sapiens
MQAPEPRRPVVLASGCPGLLSLRLALFY

SEQ ID NO: 5440 - protein, 169 aa, Homo sapiens
  SITE (51): Xaa equals any amino acid
  SITE (124): Xaa equals any amino acid
  SITE (140): Xaa equals any amino acid
GRSQGLPGGCAGPGPVRGAAGSDQGGGGEGQLAADRLTMADHRRPQRSPCXSPSGCAHCMPGKGQHFMDPGEAPPPPHTPAPHCRCCLNKSADLQKKKKKTRGGARYPIRPIVSRITIHWPSFXNVVTGKTLALPNFNRXAAHPPFASWRNSEEARTDRPFPTVAHLEW

SEQ ID NO: 5441 - protein, 356 aa, Homo sapiens; identical to SEQ ID NO: 3852

SEQ ID NO: 5442 - protein, 110 aa, Homo sapiens
MSARWLFSSGLLLVGLVNIFFAWSSTVPVFAALWFLNGLAQGLGWPPCGKVLRKWFEPSQFGTWWAILSTSMNLAGGLGPILATILAQSYSCLLPPTKHPHQDGPSVQEG

SEQ ID NO: 5443 - protein, 125 aa, Homo sapiens
DFTKGMSTSSLGHWSNTFRKACMKLSLVAIPSCLSKLIKELAFSLSSSLLSSDRMITLLNISGRKCLGALISLTPLTASFAFPLFRYSVTTVSVSLRSSSFDGGGFLLVLAGFSWISGGLVLRPS

SEQ ID NO: 5444 - protein, 198 aa, Homo sapiens
  SITE (161): Xaa equals any amino acid
  SITE (189): Xaa equals any amino acid
MSPWLLLLLVVGSWLLARILAWTYAFYNNCRRLQCFPQPPKRNWFWGHLGLITPTEEGLKDSTQMSATYSQGFTVWLGPIIPFIVLCHPDTIRSITNASAAIAPKDNLFIRFLKPWLGEGILLSGGDKWSRHRRMLTPAFHFNILKSYITIFNKSANIMLXSPLKSGSQMESWGGGTMDTSGLEFWLFXVALGLALPL

SEQ ID NO: 5445 - protein, 345 aa, Homo sapiens
  SITE (118): Xaa equals any amino acid
  SITE (150): Xaa equals any amino acid
  SITE (153): Xaa equals any amino acid
  SITE (155): Xaa equals any amino acid
  SITE (163): Xaa equals any amino acid
  SITE (168): Xaa equals any amino acid
GKCCSCPLSLAALLGEGILLSGGDKWSRHRRMLTPAFHFNILKSYITIFNKSANIMLDKWQHLASEGSSRLDMFEHISLMTLDSLQKCIFSFDSHCQERPSEYIATILELSALVEKRXQHILQHMDFLYYLSHDGRRFHRACRLVHDFTXAVXRXRRRTLPTXGIDDXFKDKAKSKTLDFIDVLLLSKDEDGKALSDEDIRAEADTFMFGGHDTTASGLSWVLYNLARHPEYQERCRQEVQELLKDRDPKEIEWDDLAQLPFLTMCVKESLRLHPPAPFISRCCTQDIVLPDGRVIPKGITCLIDIIGVHHNPTVWPDPEVLPSPFTTTTPILYFCVCVCEFQGS

SEQ ID NO: 5446 - protein, 389 aa, Homo sapiens
FQSWAQPLFLLSCNRKTHFGAGIPIMSVMVVRKKVTRKWEKLPGRNTFCCDGRVMMARQKGIFYLTLFLILGTCTLFFAFECRYLAVQLSPAIPVFAAMLFLFSMATLLRTSFSDPGVIPRALPDEAAFIEMEIEATNGAVPQGQRPPPRIKNFQINNQIVKLKYCYTCKIFRPPRASHCSICDNCVERFDHHCPWVGNCVGKRNYRYFYLFILSLSLLTIYVFAFNIVYVALKSLKIGFLETLKETPGTVLEVLICFFTLWSVVGLTGFHTFLVALNQTTNEDIKGSWTGKNRVQNPYSHGNIVKNCCEVLCGPLPPSVLDRRGILPLEESGSRPPSTQETSSSLLPQSPAPTEHLNSNEMPEDSSTPEEMPPPEPPEPPQEAAEAEK

SEQ ID NO: 5447 - protein, 328 aa, Homo sapiens
  SITE (26): Xaa equals any amino acid
  SITE (76): Xaa equals any amino acid
KVILGDTIEGTPAVPFRNSRVDPRVXMSETTVGVVCRQLGCADKGKINPASLDKAMSIPMWVDNVQCPKGPDTLWXCPSSPWEKRLASPSEETWITCDNKIRLQEGPTSCSGRVEIWHGGSWGTVCDDSWDLDDAQVVCQQLGCGPALKAFKEAEFGQGTGPIWLNEVKCKGNESSLWDCPARRWGHSECGHKEDAAVNCTDISVQKTPQKATTGRSSRQSSFIAVGILGVVLLAIFVALFFLTKKRRQRQRLAVSSRGENLVHQIQYREMNSCLNADDLDLMNSSENSHESADFSAAELISVSKFLPISGMEKEAILSHTEKENGNL

SEQ ID NO: 5448 - protein, 56 aa, Homo sapiens
MFSSIDLASRCMEFTILLTTCSVHFKYITIKRSSFPSHTNRQFSKRDNSSCSRDVQ

SEQ ID NO: 5449 - protein, 450 aa, Homo sapiens
  SITE (182): Xaa equals any amino acid
  SITE (184): Xaa equals any amino acid
  SITE (224): Xaa equals any amino acid
  SITE (238): Xaa equals any amino acid
MTQGFWENSMLTDPGNVQKAVCHPTAWDLGKGDFRILMCTKVTMDDFLTAHHEMGHIQYDMAYAAQPFLLRNGANEGFHEAVGEIMSLSAATPKHLKSIGLLSPDFQEDNETEINFLLKQALTIVGTLPFTYMLEKWRWMVFKGEIPKDQWMKKWWEMKREIVGVVEPVPHDETYCDPASLXHXSNDYSFIRYYTRTLYQFQFQEALCQAAKHEGPLHKCDISXSTEAGQKLFNMLRXGKSEPWTLALENVVGAKNMNVRPLLNYFEPLFTWLKDQNKNSFVGWSTDWSPYADQSIKVRISLKSALGDKAYEWNDNEMYLFRSSVAYAMRQYFLKVKNQMILFGEEDVRVANLKPRISFNFFVTAPKNVSDIIPRTEVEKAIRMSRSRINDAFRLNDDSLEFLGIQPTLGPPNQPPVSIWLIVFGVVMGVIVVGIVILIFTGIRDRKKGL

SEQ ID NO: 5450 - protein, 261 aa, Homo sapiens
MNNAGDKWSAFLKEQSTLAQMYPLQEIQNLTVKLQLQALQQNGSSVLSEDKSKRLNTILNTMSTIYSTGKVCNPDNPQECLLLEPGLNEIMANSLDYNERLWAWESWRSEVGKQLRPLYEEYVVLKNEMARANHYEDYGDYWRGDYEVNGVDGYDYSRGQLIEDVEHTFEEIKPLYEHLHAYVRPKLMNAYPSYISPIGCLPAHLLGDMWGRFWTNLYSLTVPFGQKPNIDVTDAMVDQAWDAQRIFKEAEKFLYLLVFLI

SEQ ID NO: 5451 - protein, 116 aa, Homo sapiens
KHELCQNKKYLCLYIFITPFSPLGLLSLREVVTPFTATVTAQVLTLQEGGRWGPLGLLVPSWCVAGGPSHVPPGGPHSLADEQIPLATHVLSDISDVLLLCEDQCFLSLHFLPNLG

SEQ ID NO: 5452 - protein, 1 aa, Homo sapiens
W

SEQ ID NO: 5453 - protein, 80 aa, Homo sapiens
  SITE (8): Xaa equals any amino acid
KLVIPRVXRIRHEINHCPGGGWHGPEDAAGLSAPADCSCCGKQGHRSIGTQEPRPAVASAWPGQPWKLGGEATFLGACSD

SEQ ID NO: 5454 - protein, 356 aa, Homo sapiens; identical to SEQ ID NO: 3852

SEQ ID NO: 5455 - protein, 65 aa, Homo sapiens; identical to SEQ ID NO: 3859

SEQ ID NO: 5456 - protein, 26 aa, Homo sapiens
MYFYFSKRKYVSKIILKGLHTNFWTT

SEQ ID NO: 5457 - protein, 955 aa, Homo sapiens
ETVTKGNKSWSSTAVAAALELVDPPGCRNSARGEITGRCTAMGPFKSSVFILILHLLEGALSNSLIQLNNNGYEGIVVAIDPNVPEDETLIQQIKDMVTQASLYLFEATGKRFYFKNVAILIPETWKTKADYVRPKLETYKNADVLVAESTPPGNDEPYTEQMGNCGEKGERIHLTPDFIAGKKLAEYGPQGRAFVHEWAHLRWGVFDEYNNDEKFYLSNGRIQAVRCSAGITGTNVVKKCQGGSCYTKRCTFNKVTGLYEKGCEFVLQSRQTEKASIMFAQHVDSIVEFCTEQNHNKEAPNKQNQKCNLRSTWEVIRDSEDFKKTTPMTTQPPNPTFSLLQIGQRIVCLVLDKSGSMATGNRLNRLNQAGQLFLLQTVELGSWVGMVTFDSAAHVQSELIQINSGSDRDTLAKRLPAAASGGTSICSGLRSAFTVIRKKYPTDGSEIVLLTDGEDNTISGCFNEVKQSGAIIHTVALGPSAAQELEELSKMTGGLQTYASDQVQNNGLIDAFGALSSGNGAVSQRSIQLESKGLTLQNSQWMNGTVIVDSTVGKDTLFLITWTTQPPQILLWDPSGQKQGGFVVDKNTKMAYLQIPGIAKVGTWKYSLQASSQTLTLTVTSRASNATLPPITVTSKTNKDTSKFPSPLVVYANIRQGASPILRASVTALIESVNGKTVTLELLDNGAGADATKDDGVYSRYFTTYDTNGRYSVKVRALGGVNAARRRVIPQQSGALYIPGWIENDEIQWNPPRPEINKDDVQHKQVCFSRTSSGGSFVASDVPNAPIPDLFPPGQITDLKAEIHGGSLINLTWTAPGDDYDHGTAHKYIIRISTSILDLRDKFNESLQVNTTALIPKEANSEEVFLFKPENITFENGTDLFIAIQAVDKVDLKSEISNIARVSLFIPPQTPPETPSPDETSAPCPNIHINSTIPGIHILKIMWKWIGELQLSIA

SEQ ID NO: 5458 - protein, 50 aa, Homo sapiens; identical to SEQ ID NO: 3860

SEQ ID NO: 5459 - protein, 649 aa, Homo sapiens
CACEETGGAGRGSRCLTRRSCVRGKGRRRSRIAVAEMFRCGGLAAGALKQKLVPLVRTVCVRSPRQRNRLPGNLFQRWHVPLELQMTRQMASSGASGGKIDNSVLVLIVGLSTVGAGAYAYKTMKEDEKRYNERISGLGLTPEQKQKKAALSASEGEEVPQDKAPSHVPFLLIGGGTAAFAAARSIRARDPGARVLIVSEDPELPYMRPPLSKELWFSDDPNVTKTLRFKQWNGKERSIYFQPPSFYVSAQDLPHIENGGVAVLTGKKVVQLDVRDNMVKLNDGSQITYEKCLIATGGTPRSLSAIDRAGAEVKSRTTLFRKIGDFRSLEKISREVKSITIIGGGFLGSELACALGRKARALGTEVIQLFPEKGNMGKILPEYLSNWTMEKVRREGVKVMPNAIVQSVGVSSGKLLIKLKDGRKVETDHIVAAVGLEPNVELAKTGGLEIDSDFGGFRVNAELQARSNIWVAGDAACFYDIKLGRRRVEHHDHAVVSGRLAGENMTGAAKPYWHQSMFWSDLGPDVGYEAIGLVDSSLPTVGVFAKATAQDNPKSATEQSGTGIRSESETESEASEITIPPSTPAVPQAPVQGEDYGKGVIFYLRDKVVVGIVLWNIFNRMPIARKIIKDGEQHEDLNEVAKLFNIHED

SEQ ID NO: 5460 - protein, 185 aa, Homo sapiens
MSPSGRLCLLTIVGLILPTRGQTLKDTTSSSSADSTIMDIQVPTRAPDAVYTELQPTSPTPTWPADETPQPQTQTQQLEGTDGPLVTDPETHKSTKAAHPTDDTTTLSERPSPSTDVQTDPQTLKPSGFHEDDPFFYDEHTLRKRGLLVAAVLSSQASSSSPVASAGSCPGYAGIIAGESIRNRS

SEQ ID NO: 5461 - protein, 16 aa, Homo sapiens
TPWVQLHPDFHSAPLV

SEQ ID NO: 5462 - protein, 21 aa, Homo sapiens
MFLTSTIGLCCLTPWVFAHFP

SEQ ID NO: 5463 - protein, 21 aa, Homo sapiens
MFLTSTIGLCCLTPWVFAHFP

SEQ ID NO: 5464 - protein, 114 aa, Homo sapiens [sequence omitted]

SEQ ID NO: 5465 - protein, 280 aa, Homo sapiens
  SITE (152): Xaa equals any amino acid
DFRGETAWGENLLEMWWFQQGLSFLPSALVIWTSAAFIFSYITAVTLHHIDPALPYISDTGTVAPEKCLFGAMLNIAAVLCIATIYVRYKQVHALSPEENVIIKLNKAGLVLGILSCLGLSIVANFQKTTLFAAHVSGAVLTFGMGSLYMFXQTILSYQMQPKIHGKQVFWIRLLVVIWCGVSALSMLTCSSVLHSGNFGTDLEQKLHWNPEDKGYVLHMITTAAEWSMSFSFFGFFLTYIRDFQKISLRVEANLHGLTLYDTAPCPINNERTRLLSRDI

SEQ ID NO: 5466 - protein, 332 aa, Homo sapiens
MKLGRAVLGLLLLAPSVVQAVEPISLGLALAGVLTGYIYPRLYCLFAECCGQKRSLSREALQKDLDDNLFGQHLAKKIILNAVFGFINNPKPKKPLTLSLHGWTGTGKNFVSKIIAENIYEGGLNSDYVHLFVATLHFPHASNITLYKDQLQLWIRGNVSACARSIFIFDEMDKMHAGLIDAIKPFLDYYDLVDGVSYQKAMFIFLSNAGAERITDVALDFWRSGKQREDIKLKDIEHALSVSVFNNKNSGFWHSSLIDRNLIDYFVPFLPLEYKHLKMCIRVEMQSRGYEIDEDIVSRVAEEMTFFPKEERVFSDKGCKTVFTKLDYYYDD

SEQ ID NO: 5467 - protein, 332 aa, Homo sapiens; identical to SEQ ID NO: 5466

SEQ ID NO: 5468 - protein, 48 aa, Homo sapiens
  SITE (17): Xaa equals any amino acid
MRLMPWMWWSSLPSTAXASSPRTSSSTPGPSAASLPRGQPCPTQMLVP

SEQ ID NO: 5469 - protein, 143 aa, Homo sapiens; identical to SEQ ID NO: 3867

SEQ ID NO: 5470 - protein, 237 aa, Homo sapiens
  SITE (43): Xaa equals any amino acid
  SITE (44): Xaa equals any amino acid
  SITE (169): Xaa equals any amino acid
MARGPLAARGLRLLLPLLPLLPLPQVGRAAFSLGSATAGRVPXXTTPLPGSPLSPQVALGFADGSCDPSDQCPPQARWSSLWHVGLILLAVLLLLLCGVTAGCVRFCCLRKQAQAQPHLPPARQPCDVAVIPMDSDSPVHSTVTSYSSVQYPLGMRLPLPFGELDLDSXAPPAYSLYTPEPPPSYDEAVKMAKPREEGPALSQKPSPLLGASGLETTPVPQESGPNTQLPPCSPGAP

SEQ ID NO: 5471 - protein, 89 aa, Homo sapiens; identical to SEQ ID NO: 3687

SEQ ID NO: 5472 - protein, 89 aa, Homo sapiens; identical to SEQ ID NO: 3687

SEQ ID NO: 5473 - protein, 126 aa, Homo sapiens
WRGREPVRREDEEARAASHTSRFSKFWGGSAPPAEVGPLSPACPGLGSPSLPALCPLRWLFVFVFFCIHQRLHLCVAGRAWVLVLATDQLCGPGRVVAPWSPASISIKWLFRERGAGFLCDSGVLP

SEQ ID NO: 5474 - protein, 99 aa, Homo sapiens
LLKGQKLELHRGGGRSRTSGSPGLQEFGTRETPEGVQLDQGDIRHLTVFSVCPSLYSNVRNGSVFFFTFIGSSYFSTLFLMCSFFNWLVFPYYLQLYGL

SEQ ID NO: 5475 - protein, 89 aa, Homo sapiens; identical to SEQ ID NO: 3687

SEQ ID NO: 5476 - protein, 17 aa, Homo sapiens
MNELLLFFFFFFFLHFV

SEQ ID NO: 5477 - protein, 258 aa, Homo sapiens; identical to SEQ ID NO: 4729

SEQ ID NO: 5478 - protein, 406 aa, Homo sapiens
  SITE (364): Xaa equals any amino acid
MGPSTPLLILFLLSWSGPLQGQQHHLVEYMERRLAALEERLAQCQDQSSRHAAELRDFKNKMLPLLEVAEKEREALRTEADTISGRVDRLEREVDYLETQNPALPCVEFDEKVTGGPGTKGKGRRNEKYDMVTDCGYTISQVRSMKILKRFGGPAGLWTKDPLGQTEKIYVLDGTQNDTAFVFPRLRDFTLAMAARKASRVRVPFPWVGTGQLVYGGFLYFARRPPGRPGGGGEMENTLQLIKFHLANRTVVDSSVFPAEGLIPPYGLTADTYIDLAADEEGLWAVYATREDDRHLCLAKLDPQTLDTEQQWDTPCPRENAEAAFVICGTLYVVYNTRPASRARIQCSFDASGTLTPERAALPXFPRRYGAHASLRYNPRERQLYAWDDGYQIVYKLEMRKKEEEV

SEQ ID NO: 5479 - protein, 406 aa, Homo sapiens; identical to SEQ ID NO: 3995

SEQ ID NO: 5480 - protein, 406 aa, Homo sapiens; identical to SEQ ID NO: 3995

SEQ ID NO: 5481 - protein, 13 aa, Homo sapiens
MCWRLPSRAACCC

SEQ ID NO: 5482 - protein, 453 aa, Homo sapiens
MALVRALVCCLLTAWHCRSGLGLPVAPAGGRNPPPAIGQFWHVTDLHLDPTYHITDDHTKVCASSKGANASNPGPFGDVLCDSPYQLILSAFDFIKNSGQEASFMIWTGDSPPHVPVPELSTDTVINVITNMTTTIQSLFPNLQVFPALGNHDYWPQDQLPVVTSKVYNAVANLWKPWLDEEAISTLRKGGFYSQKVTTNPNLRIISLNTNLYYGPNIMTLNKTDPANQFEWLESTLNNSQQNKEKVYIIAHVPVGYLPSSQNITAMREYYNEKLIDIFQKYSDVIAGQFYGHTHRDSIMVLSDKKGSPVNSLFVAPAVTPVKSVLEKQTNNPGIRLFQYDPRDYKLLDMLQYYLNLTEANLKGESIWKLEYILTQTYDIEDLQPESLYGLAKQFTILDSKQFIKYYNYFFVSYDSSVTCDKTCKAFQICAIMNLDNISYADCLKQLYIKHNY

SEQ ID NO: 5483 - protein, 54 aa, Homo sapiens
MALVRALVCCLLTAWHCRSGLGLPVAPAGGRNPPPAIGIAHLMFLYLNSQQTLL

SEQ ID NO: 5484 - protein, 110 aa, Homo sapiens; identical to SEQ ID NO: 3875

SEQ ID NO: 5485 - protein, 11 aa, Homo sapiens
MALVRHSSAAC

SEQ ID NO: 5486 - protein, 503 aa, Homo sapiens
MGMVSVGFLLFILFTSNPFSRTLPNFPIEGRDLNPLLQDPGLIFHPPLLYMGYVGFSVAFAFAIASLLSGRLDSTYARFTRPWTLAAWIFLTLGIVLGSAWAYYELGWGGWWFWDPVENASFMPWLVGTALMHSLAVTEQRASFKAWTLLLAISAFSLCLLGTFLVRSGVLVSVHAFASDPARGMFILAFMVLVIGGSLLLFAARGHKVRSRVNNALWSRESLLLANNVLLVAAMLVVLLGTLLPLVHKQLGLGSISIGEPFFNTMFTWLMVPFALLLGVGPLVRWGRDRPRKIRNLLIIAFISTLVLSLLLPWLFESKVVAMTVLGLAMACWIAVLAIAEAALRISRGTKTTFSYWGMVAAHLGLAVTIVGIAFSQNYSVERDVRMKSGDSVDIHEYRFTFRDVKEVTGPNWRGGVATIGVTRDGKPETVLYAEKRYYNTAGSMMTEAAIDGGITRDLYAALGEELENGAWAVRLYYKPFVRWIWAGGLMMALGGPGTQFAL

SEQ ID NO: 5487 - protein, 122 aa, Homo sapiens
  SITE (86): Xaa equals any amino acid
  SITE (87): Xaa equals any amino acid
  SITE (104): Xaa equals any amino acid
  SITE (120): Xaa equals any amino acid
NPPLLPKELEKFFISPTATIAGSPCTAIAPFQGCPLTRLPAPMGSRAVPSFLMLNDILLYEYIIFCLSIHQLMDIELFSLLAIMNXXRLLSKVAALFSILPALXEHQISSQSSTLGNNNXIL

SEQ ID NO: 5488 - protein, 447 aa, Homo sapiens
  SITE (446): Xaa equals any amino acid
GRGICENGCCLNTRGSYTCKCNDGFTASPNQDECLDNREGYCFTEVLQNMCQIGSSNRNPVTKSECCCDGGRGWGPHCEICPFQGTVAFKKLCPHGRGFMTNGADIDECKVIHDVCRNGECVNDRGSYHCICKTGYTPDITGTSCVDLNECNQAPKPCNFICKNTEGSYQCSCPKGYILQEDGRSCKDLDECATKQHNCQFLCVNTIGGFTCKCPPGFTQHHTSCIDNNECTSDINLCGSKGICQNTPGSFTCECQRGFSLDQTGSSCEDVDECEGNHRCQHGCQNIIGGYRCSCPQGYLQHYQWNQCVDENECLSAHICGGASCHNTLGSYKCMCPAGFQYEQFSGGCQDINECGSAQAPCSYGCSNTEGGYLCGCPPGYFRIGQGHCVSGMGMGRGNPEPPVSGEMDDNSLSPEACYECKINGYPKRGRKRRSTSETDASKASXH

SEQ ID NO: 5489 - protein, 193 aa, Homo sapiens
MILWFDGQTSLAIWCFAMIAAILPYIMLNLGILGRRYKVFMGDAGSTLIGFTVIWILLETTQGKTHPISPVTALWIIAIPLMDMVAIMYRRLRKGMSPFSPDRQHIHHLIMRAGFTSRQAFVLITLAAALLASIGVLAEYSHFVPEWVMLVLFLLAFFLYGYCIKRAWKVARFIKRVKRRLRRNRGGSPNLTK

SEQ ID NO: 5490 - protein, 23 aa, Homo sapiens
MFILPLMFVTPRKLRKKKVFYIV

SEQ ID NO: 5491 - protein, 44 aa, Homo sapiens; identical to SEQ ID NO: 3880

SEQ ID NO: 5492 - protein, 672 aa, Homo sapiens; identical to SEQ ID NO: 3105

SEQ ID NO: 5493 - protein, 75 aa, Homo sapiens
  SITE (2): Xaa equals any amino acid
KXLFILGIQILACALAASILRRHLMVWKVFAPKFIFEAVGFIVSSVGLLLGIALVMRVDGAVSSWFRQLFLAQQR

SEQ ID NO: 5494 - protein, 596 aa, Homo sapiens
MQKASVLLFLAWVCFLFYAGIALFTSGFLLTRLELTNHSSCQEPPGPGSLPWGSQGKPGACWMASRFSRVVLVLIDALRFDFAQPQHSHVPREPPVSLPFLGKLSSLQRILEIQPHHARLYRSQVDPPTTTMQRLKALTTGSLPTFIDAGSNFASHAIVEDNLIKQLTSAGRRVVFMGDDTWKDLFPGAFSKAFFFPSFNVRDLDTVDNGILEHLYPTMDSGEWDVLIAHFLGVDHCGHKHGPHHPEMAKKLSQMDQVIQGLVERLENDTLLVVAGDHGMTTNGDHGGDSELEVSAALFLYSPTAVFPSTPPEEPEVIPQVSLVPTLALLLGLPIPFGNIGEVMAELFSGGEDSQPHSSALAQASALHLNAQQVSRFLHTYSAATQDLQAKELHQLQNLFSKASADYQWLLQSPKGAEATLPTVIAELQQFLRGARAMCIESWARFSLSFLLLHLLAAGIPVTTPGPFTVPWQAVSAWALMATQTFYSTGHQPVFPAIHWHAAFVGFPEGHGSCTWLPALLVGANTFASHLLFAVGCPLLLLWPFLCESQGLRKRQQPPGNEADARVRPEEEEEPLMEMRLRDAPQHFYAALLQLG

SEQ ID NO: 5495 - protein, 672 aa, Homo sapiens; identical to SEQ ID NO: 3105

SEQ ID NO: 5496 - protein, 76 aa, Homo sapiens
  SITE (4): Xaa equals any amino acid
  SITE (41): Xaa equals any amino acid
LILXLLLALALLWWFWPLCCTVIIKEVPPPPAEESEVSDHXRMAVGGQGGRVGWRAGWAAGHLAPCRAELSQAQRI

SEQ ID NO: 5497 - protein, 50 aa, Homo sapiens
IINSCPLVSPTCGDNKIIKQILILYKTGKKALGQYGNHDVGLVESEQSTL

SEQ ID NO: 5498 - protein, 98 aa, Homo sapiens
  SITE (76): Xaa equals any amino acid
  SITE (78): Xaa equals any amino acid
  SITE (88): Xaa equals any amino acid
SAQAIMPSLPQEGVIQGPSPLDLNTELPYQSTMKRKVRKKKKKGTITANVAGTKFEIVRLVIDEMGFMKTPDEDEXSXLIWCDSAVQXRKFQSCKIIR

SEQ ID NO: 5499 - protein, 11 aa, Homo sapiens
QGIFLLLVFCT

SEQ ID NO: 5500 - protein, 11 aa, Homo sapiens
QGIFLLLVFCT

SEQ ID NO: 5501 - protein, 138 aa, Homo sapiens; identical to SEQ ID NO: 3884

SEQ ID NO: 5502 - protein, 138 aa, Homo sapiens; identical to SEQ ID NO: 3884

SEQ ID NO: 5503 - protein, 114 aa, Homo sapiens
  SITE (15): Xaa equals any amino acid
  SITE (17): Xaa equals any amino acid
  SITE (22): Xaa equals any amino acid
WCPMAFLGVLTSPGXGXFPPQXGGARHLEMAEILGADTRTARIQDAGLVLADTLRKFLFDLDVDDGLAAVGYSKADIPALVKGTLPQERVTKLAPRPQSEEDLAALFEASMKLY

SEQ ID NO: 5504 - protein, 66 aa, Homo sapiens
  SITE (10): Xaa equals any amino acid
  SITE (13): Xaa equals any amino acid
  SITE (27): Xaa equals any amino acid
CCPAITPNSXKHXPMRPCRATSAPIPXSSGSSVGGACSCIITTECAPYLFALRLSISSSPRNSYSA

SEQ ID NO: 5505 - protein, 37 aa, Homo sapiens; identical to SEQ ID NO: 3887

SEQ ID NO: 5506 - protein, 26 aa, Homo sapiens
LLAEWRLVFSNPVWWSPLLQSTLQRK

SEQ ID NO: 5507 - protein, 193 aa, Homo sapiens
  SITE (106): Xaa equals any amino acid
MLPFPIFLVLLLRGLVLWTPASSGTIMPEERKTEIERETETESETVIGTEKENAPERERGSVITVLHQVFSTAMKNDTDTGNMQKEVMSVTEQVEKKKNDIEKDDXGRKRKPDISLLEVIVDVAMKVKKEIVTGDTNTKNLKEAKKEKKRAVSLPLNRRAPKLHLQNRHGFGLLCILVPEVDTINLVIFLDNV

SEQ ID NO: 5508 - protein, 118 aa, Homo sapiens
  SITE (71): Xaa equals any amino acid
  SITE (81): Xaa equals any amino acid
  SITE (93): Xaa equals any amino acid
  SITE (98): Xaa equals any amino acid
MLPFPIFLVLLLRGLVLWTPASSGTIMPEERKTEIERETETESETAIGTEKENAPERERGSRDHSPTPSVXNSDEERYRYXGILHERGYERTXQVEKXKNRHRERPTREKEETRHKSS

SEQ ID NO: 5509 - protein, 193 aa, Homo sapiens; identical to SEQ ID NO: 3889

SEQ ID NO: 5510 - protein, 259 aa, Homo sapiens
SATEVDNNFSKPPPFFPPGAPPTHLPPPPFLPPPPTVSTAPPLIPPPGIPITVPPPGFPPPPGAPPPSLIPTIESGHSSGYDSRSARAFPYGNVAFPHLPGSAPSWPSLVDTSKQWDYYARREKDRDRERDRDRERDRDRDRERERTRERERERDHSPTPSVFNSDEERYRYREYAERGYERHRASREKEERHRERRHREKEETRHKSSRSNSRRRHESEEGDSHRRHKHKKSKRSKEGKEAGSEPAPEQESTEATPAE

SEQ ID NO: 5511 - protein, 63 aa, Homo sapiens
FLGSRYTVVSLLLPQLAIDGILCLPLIRNLGILGRARWLTPVIPALWEAEAGRSPEVRSSRPA

SEQ ID NO: 5512 - protein, 39 aa, Homo sapiens; identical to SEQ ID NO: 3890

SEQ ID NO: 5513 - protein, 38 aa, Homo sapiens; identical to SEQ ID NO: 3891

SEQ ID NO: 5514 - protein, 17 aa, Homo sapiens
FSPAFHFPKGPSHTAFF

SEQ ID NO: 5515 - protein, 100 aa, Homo sapiens [sequence omitted]

SEQ ID NO: 5516 - protein, 163 aa, Homo sapiens
MGRPSPRQGPPVQGWEYRGWEVCIRGDRHRPARYRPLGVLTGGFRQGHCALPRHSVDLERAECFPFQMWLVMEGAVVQVGLGLGTRGSAQLHVQEVVHPSYDLLAGAHHLQRAAVVHVVAGFVVLADGKVQCTPHTLLLHAGVHGASHQARRLAGTGAGRGSC

SEQ ID NO: 5517 - protein, 128 aa, Homo sapiens
PATSEKESILLFPDLRCALAGHNDLVEIHLSGRLGVCTGLACAYHLLCTPPTPCIPTPGLVAPALGKVSPCACTRRQTEKAAGGLCCSARGSALPPSFLLLIAPVCGAYTPTSCNKIVASAKKKKKKK

SEQ ID NO: 5518 - protein, 173 aa, Homo sapiens
  SITE (158): Xaa equals any amino acid
  SITE (170): Xaa equals any amino acid
FQSGRPAVNKISTTDAIFVQRDLKLVQGFMPHFFRLFRSTVKQVDFSEVERARFIINDWVKTHTKGMISNLLGKGAVDQLTRLVLVNALYFNGQWKTPFPDSSTHRRLFHKSDGSTVSVPMMAQTNKFNYTEFTTPDGHYYDILELPYHGDTLSMFIXPLMKKRCLSLPXPTF

SEQ ID NO: 5519 - protein, 211 aa, Homo sapiens; identical to SEQ ID NO: 3895

SEQ ID NO: 5520 - protein, 87 aa, Homo sapiens
  SITE (40): Xaa equals any amino acid
  SITE (77): Xaa equals any amino acid
QSKACAAAASALSRKDAWRCRLWRPRDLKAPVTSAPDGAXAHEHDCGLWHAHIGGSARKFPGPGRRAFCWSMQGSCXSFMSVMSAVA

SEQ ID NO: 5521 - protein, 428 aa, Homo sapiens
MQELHLLWWALLLGLAQACPEPCDCGEKYGFQIADCAYRDLESVPPGFPANVTTLSLSANRLPGLPEGAFREVPLLQSLWLAHNEIRTVAAGALASLSHLKSLDLSHNLISDFAWSDLHNLSALQLLKMDSNELTFIPRDAFRSLRALRSLQLNHNRLHTLAEGTFTPLTALSHLQINENPFDCTCGIVWLKTWALTTAVSIPEQDNIACTSPHVLKGTPLSRLPPLPCSAPSVQLSYQPSQDGAELRPGFVLALHCDVDGQPAPQLHWHIQIPSGIVEITSPNVGTDGRALPGTPVASSQPRFQAFANGSLLIPDFGKLEEGTYSCLATNELGSAESSVDVALATPGEGGEDTLGRRFHGKAVEGKGCYTVDNEVQPSGPEDNVVIIYLSRAGNPEAAVAEGVPGQLPPGLLLLGQSLLLFFFLTSF

SEQ ID NO: 5522 - protein, 126 aa, Homo sapiens
  SITE (1): Xaa equals any amino acid
  SITE (2): Xaa equals any amino acid
  SITE (5): Xaa equals any amino acid
  SITE (14): Xaa equals any amino acid
XXGIXCRFGWGPGXMAKRLRERAAIRLTTRCSHQGRRTMWSSSTSAVLGTLRLQSQKGSLGSCPQACSCWAKASSSSSSSPPSSPTQGFPNSSPCPYQCPFKCCRGLGLATPEACMGDFTFSYLSF

SEQ ID NO: 5523 - protein, 428 aa, Homo sapiens; identical to SEQ ID NO: 5521

SEQ ID NO: 5524 - protein, 71 aa, Homo sapiens; identical to SEQ ID NO: 3897

SEQ ID NO: 5525 - protein, 71 aa, Homo sapiens; identical to SEQ ID NO: 3897

SEQ ID NO: 5526 - protein, 71 aa, Homo sapiens; identical to SEQ ID NO: 3897

SEQ ID NO: 5527 - protein, 176 aa, Homo sapiens
  SITE (66): Xaa equals any amino acid
SIRKEPALPSPAPLPLPFSGSAPRRTRYGRLTPSLSPAPSSGTVVPLIKEEPRTPRRRSGAAVWMXLGCRPRRALPSVLPFSRDQVASVPGSRPCVPCSLPHLLRTKSGSPAPKSWNPFSASWGPRPPLPSRPVCLLPWLQGPPHRDQGGIPMGLASRHRARPTVPWASMEVVLCL

SEQ ID NO: 5528 - protein, 180 aa, Homo sapiens [sequence omitted]

SEQ ID NO: 5529 - protein, 102 aa, Homo sapiens
MPAPARSCQRAALSLWASGLGWLSAQPTVAFRGSSWDWEPPQGQADGVRFVLGLVLPMLGGGGAPRTDQPCFSCNAVTLSLNTWIHVWPGLAGSKSPAPVGS

SEQ ID NO: 5530 - protein, 128 aa, Homo sapiens
MGGLLFLLGFLGCCGAVRENKCLLLFFFLFILIIFLAELSAAILAFIFRENLTREFFTKELTKHYQGNNDTDVFSATWNSVMITFGCCGVNGPEDFKFASVFRLLTLDSEEVPEAAAGGNPKVGTGSC

SEQ ID NO: 5531 - protein, 122 aa, Homo sapiens
  SITE (45): Xaa equals any amino acid
VARITGVCHHARLIFIFLVEMGFCHIGQAGLELLASCDQPTLASXSAGISGVSHHTRPKLFILEKFHLHFCHSWNFPRKEGGLRFCTICFRACLDSNLCFPWQQNTLNLKQYLELRKTWWGK

SEQ ID NO: 5532 - protein, 379 aa, Homo sapiens; identical to SEQ ID NO: 4643
  SITE (359): Xaa equals any amino acid

SEQ ID NO: 5533 - protein, 2 aa, Homo sapiens
LW

SEQ ID NO: 5534 - protein, 379 aa, Homo sapiens
MARRSAFPAAALWLWSILLCLLALRAEAGPPQEESLYLWIDAHQARVLIGFEEDILIVSEGKMAPFTHDFRKAQQRMPAIPVNIHSMNFTWQAAGQAEYFYEFLSLRSLDKGIMADPTVNVPLLGTVPHKASVVQVGFPCLGKQDGVAAFEVDVIVMNSEGNTILQTPQNAIFFKTCQQAECPGGCRNGGFCNERRICECPDGFHGPHCEKALCTPRCMNGGLCVTPGFCICPPGFYGVNCDKANCSTTCFNGGTCFYPGKCICPPGLEGEQCEISKCPQPCRNGGKCIGKSKCKCSKGYQGDLCSKPVCEPGCGAHGTCHEPNKCQCQEGWHGRHCNKRYEASLIHALRPAGAQLRQHTPSLKKAEERRDPPESNYIW

SEQ ID NO: 5535 - protein, 267 aa, Homo sapiens; identical to SEQ ID NO: 3282

SEQ ID NO: 5536 - protein, 104 aa, Homo sapiens
RNCHLLPAAVLDGLPMQKSVARKAGPTAGISGASAQSKKATVMSCRQSQVQWTASLSCVFMQSQVTSPLHASWQCSWAQARASSKRCHSGSSTFWWKSRGSSLR

SEQ ID NO: 5537 - protein, 45 aa, Homo sapiens; identical to SEQ ID NO: 3903

SEQ ID NO: 5538 - protein, 315 aa, Homo sapiens
DSLPSRLFLALVTVIDSCWEGIKAACLRRFFTLLRKSLLRWTVRLSALSSSQRPHAGPPAGPSTLRPPSFPGASFGLDCPCSSILLPPPDLLSSRLPPPLARVMRSRLLLSVAHLPTIRETTEEMLLGGPGQEPPPSPSLDDYVRSISRLAQPTSVLDKATAQGQPRPPHRPAQACRKGRPAVSLRDITARFSGQQPTLPMADTVDPLDWLFGESQEKQPSQRDLPRRTGPSAGLWGPHRQMDSSKPMGAPRGRLCEARMPGHSLARPPQDGQQSSDLRSWTFGQSAQAMASRHRPRPSSVLRTLYSHLPVIHEL

SEQ ID NO: 5539 - protein, 50 aa, Homo sapiens; identical to SEQ ID NO: 3904

SEQ ID NO: 5540 - protein, 339 aa, Homo sapiens; identical to SEQ ID NO: 3314

SEQ ID NO: 5541 - protein, 339 aa, Homo sapiens; identical to SEQ ID NO: 3314

SEQ ID NO: 5542 - protein, 241 aa, Homo sapiens
PPASWLQLTLAVPLQDLSGIELGLAGRACGLEWAAGAGRCVLLPRDARHCRAFLEELLDVLQSLPPAWRNCVSATEEEVTPQHRLWPLLEKDSSLEARQFFYLRAFLVEGPSTCLVSLLLTPSTLFLLDEDAAGSPAEPSPPAASGEASEKVPPSGPGPAVRVREQQPLSSLSSVLLYRSAPEDLRLLFYDEVSRLESFWALRVVCQEQLTALLAWIREPWEELFSIGLRTVIQEALALDR

SEQ ID NO: 5543 - protein, 17 aa, Homo sapiens
LSLPSSWDYRHPPPRPS

SEQ ID NO: 5544 - protein, 48 aa, Homo sapiens; identical to SEQ ID NO: 3908

SEQ ID NO: 5545 - protein, 48 aa, Homo sapiens
  SITE (15): Xaa equals any amino acid
MPLPLGKLSCPDSSXFLFLMYLFSLLLCISQFPEFPQAICRGPFWGPI

SEQ ID NO: 5546 - protein, 2 aa, Homo sapiens
KR

SEQ ID NO: 5547 - protein, 13 aa, Homo sapiens
MWPGKRATDILSL

SEQ ID NO: 5548 - protein, 11 aa, Homo sapiens
MCVPWPLWGSK

SEQ ID NO: 5549 - protein, 65 aa, Homo sapiens; identical to SEQ ID NO: 3911

SEQ ID NO: 5550 - protein, 207 aa, Homo sapiens; identical to SEQ ID NO: 4530
  SITE (76): Xaa equals any amino acid

SEQ ID NO: 5551 - protein, 177 aa, Homo sapiens [sequence omitted]

SEQ ID NO: 5552 - protein, 94 aa, Homo sapiens
SGRERLPESVHELAPLALGHDLELLVVVLEQLVLLDDLGVASFPARLAALSTTLGAILRVLRPLLLLEPPTPRPPPHSPRGRARSTQKPARHGQ

SEQ ID NO: 5553 - protein, 46 aa, Homo sapiens; identical to SEQ ID NO: 3915

SEQ ID NO: 5554 - protein, 46 aa, Homo sapiens; identical to SEQ ID NO: 3919

SEQ ID NO: 5555 - protein, 42 aa, Homo sapiens
KKHTDAVGIDLATIQPPCSDNSKQHRHQVIFISNTNPHIHTN

SEQ ID NO: 5556 - protein, 42 aa, Homo sapiens
YFDILTAERRIVGQTEEAFLGIFYLLVCLFVCIVSPLLSMHI

SEQ ID NO: 5557 - protein, 29 aa, Homo sapiens
  SITE (7): Xaa equals any amino acid
MSHCWRXLVFCLFLFCFVLFFETGSRSVA

SEQ ID NO: 5558 - protein, 50 aa, Homo sapiens
MSLFGLLLLTSALAGQRQGTQAESNLSSKFQFSSNKEQNGRNYIQASGLA

SEQ ID NO: 5559 - protein, 50 aa, Homo sapiens; identical to SEQ ID NO: 5558

SEQ ID NO: 5560 - protein, 345 aa, Homo sapiens
MSLFGLLLLTSALAGQRQGTQAESNLSSKFQFSSNKEQNGVQDPQHERIITVSTNGSIHSPRFPHTYPRNTVLVWRLVAVEENVWIQLTFDERFGLEDPEDDICKYDFVEVEEPSDGTILGRWCGSGTVPGKQISKGNQIRIRFVSDEYFPSEPGFCIHYNIVMPQFTEAVSPSVLPPSALPLDLLNNAITAFSTLEDLIRYLEPERWQLDLEDLYRPTWQLLGKAFVFGRKSRVVDLNLLTEEVRLYSCTPRNFSVSIREELKRTDTIFWPGCLLVKRCGGNCACCLHNCNECQCVPSKVTKKYHEVLQLRPKTGVRGLHKSLTDVALEHHEECDCVCRGSTGG

SEQ ID NO: 5561 - protein, 50 aa, Homo sapiens; identical to SEQ ID NO: 5558

SEQ ID NO: 5562 - protein, 1 aa, Homo sapiens
V

SEQ ID NO: 5563 - protein, 38 aa, Homo sapiens; identical to SEQ ID NO: 2989

SEQ ID NO: 5564 - protein, 229 aa, Homo sapiens; identical to SEQ ID NO: 3927

SEQ ID NO: 5565 - protein, 180 aa, Homo sapiens
REQKLELHRGGGRSRTSGSPGLQEFGTRCPYLVRQGVARSSHFPSVTKLLLVWWEGVVMWGWGSLVSARGGWGVFIYLYMGLYIVLWGMGEPAGGENPPLSPHPPGRANVKLLIFVLYIFYINISIFFLQNQFINGRGVWGGHMELPLWGGPLHYPTYRPFPHPPPHSPPPGCDCCKMGV

SEQ ID NO: 5566 - protein, 155 aa, Homo sapiens
GTRCPYLVRQGVARSSHFPSVTKLLLVWWEGVVMWGWGSLVSARGGWGVFIYLYMGLYIVLWGMGEPAGGENPPLSPHPPGRANVKLLIFVLYIFYINISIFFLQNQFINGRGVWGGHMELPLWGGPLHYPTYRPFPHPPPHSPPPGCDCCKMGV

SEQ ID NO: 5567 - protein, 123 aa, Homo sapiens
LLGVIAIFVATVGMKCMKCLEDDEVQKMRMAVIGGAIFLLAGLAILVATAWYGNRIVQEFYDPMTPVNARYEFGQALFTGWAAASLCLLGGALLCCSCPRKTTSYPTPRPYPKPAPSSGKDYV

SEQ ID NO: 5568 - protein, 51 aa, Homo sapiens
  SITE (6): Xaa equals any amino acid
  SITE (16): Xaa equals any amino acid
  SITE (18): Xaa equals any amino acid
  SITE (36): Xaa equals any amino acid
  SITE (50): Xaa equals any amino acid
  SITE (51): Xaa equals any amino acid
PGRYGXPKPTNQTKTXCXKILSAKHGLILFNLLSLXIGGKIFPFVLLLPXX

SEQ ID NO: 5569 - protein, 132 aa, Homo sapiens
  SITE (80): Xaa equals any amino acid
  SITE (110): Xaa equals any amino acid
  SITE (125): Xaa equals any amino acid
MANAGLQLLGFILAFLGWIGAIVSTALPQWRIYSYAGDNIVTAQAMYEGLWMSCVSQSTGQIQCKVFDSLLNLSSTLQAXRALMVVGILLGVIAIFVANVGMKCMKCLEXDEVQKMRMAVIGGRXISSCRSG

SEQ ID NO: 5570 - protein, 95 aa, Homo sapiens
TKPTHVPSCDSLPSSLYQSISTEQNLHTYLHVVQCLPLSTSLFPLNKTYAHTFMWLPSSLYQSISILSAVSDMFVLCSILTTALTFPVCTECYFT

SEQ ID NO: 5571 - protein, 211 aa, Homo sapiens
MANAGLQLLGFILAFLGWIGAIVSTALPQWRIYSYAGDNIVTAQAMYEGLWMSCVSQSTGQIQCKVFDSLLNLSSTLQATRALMVVGILLGVIAIFVATVGMKCMKCLEDDEVQKMRMAVIGGAIFLLAGLAILVATAWYGNRIVQEFYDPMTPVNARYEFGQALFTGWAAASLCLLGGALLCCSCPRKTTSYPTPRPYPKPAPSSGKDYV

SEQ ID NO: 5572 - protein, 173 aa, Homo sapiens; identical to SEQ ID NO: 3932

SEQ ID NO: 5573 - protein, 20 aa, Homo sapiens
VPFRASSRQGWVGTLLPVFI

SEQ ID NO: 5574 - protein, 95 aa, Homo sapiens; identical to SEQ ID NO: 3933

SEQ ID NO: 5575 - protein, 283 aa, Homo sapiens
MEPPGDWGPPPWRSTPKTDVLRLVLYLTFLGAPCYAPALPSCKEDEYPVGSECCPKCSPGYRVKEACGELTGTVCEPCPPGTYIAHLNGLSKCLQCQMCDPAMGLRASRNCSRTENAVCGCSPGHFCIVQDGDHCAACRAYATSSPGQRVQKGGTESQDTLCQNCPPGTFSPNGTLEECQHQTKCSWLVTKAGAGTSSSHWVWWFLSGSLVIVIVCSTVGLIICVKRRKPRGDVVKVIVSVQRKRQEAEGEATVIEALQAPPDVTTVAVEETIPSFTGRSPNH

SEQ ID NO: 5576 - protein, 576 aa, Homo sapiens
MGCLWGLALPLFFFCWEVGVSGSSAGPSTRRADTAMTTDDTEVPAMTLAPGHAALETQTLSAETSSRASTPAGPIPEAETRGAKRISPARETRSFTKTSPNFMVLIATSVETSAASGSPEGARMTTVQTITGSDPREAIFDTLCTDDSSEEAKTLTMDILTLAHTSTEAKGLSSESSASSDGPHPVITPSRASESSASSDGPHPVITPSRASESSASSDGPHPVITPSRASESSASSDGPHPVITPSRASESSASSDGPHPVITPSWSPGSDVTLLAEALVSVTNIEVINCSITEIETTTSSIPGASDTDLIPTEGVKASSTSDPPALPDSTEAKPHITEVTASAETLSTAGTTESAAPDATVGTPLPTNSATEREVTAPGATTLSGALVTVSRNPLEETSALSVETPSYVKVSGAAPVSIEAGSAVGKTTSFAGSSASSYSPSEAALKNFTPSETPTMDIATKGPFPTSRDPLPSVPPTTTNSSRGTNSTLAKITTSAKTTMKPPTATPTTARTRPTTDVSAGENGGFLLLRLSVASPEDLTDPRVAERLMQQLHRELHAHAPHFQVSLLRVRRG

SEQ ID NO: 5577 - protein, 179 aa, Homo sapiens
MGFWGIGPGALSTSCIPYPLSHGPGSVKAEMLHMYSQKDPLILCVRLAVLLAVTLTVPVVLFPIRRALQQLLFPGKAFSWPRHVAIALILLVLVNVLVICVPTIRDIFGVIGSTSAPSLIFILPSIFYLRIVPSEVEPFLSWPKIQALCFGVLGVLFMAVSLGFMFANWATGQSRMSGH

SEQ ID NO: 5578 - protein, 221 aa, Homo sapiens
MALALAALAAVEPACGSRYQQLQNEEEPGEPEQAVGDAPPPYSSISAESAAYFDYKDECGFPKPPSYNVATTLPSYDEAERTKAEATIPLVPGRDEDFVGRDDFDDADQLRIGNDGIFMLTFFMAFLFNWIGFFLSFCLTTSAAGRYGAISGFGLSLIKWILIVRFSTYFPGYFDGQYWLWWVFLVLGFLLFLRGFINYAKVRKMPETFSNLPRTRVLFIY

SEQ ID NO: 5579 - protein, 74 aa, Homo sapiens
MVEFRLCIFCKNTIKVMLVPFSVHHIRRHTILICCITNGINFNHLVKVLSSMFLNIFPFVINSILWEKPLRLCK

SEQ ID NO: 5580 - protein, 58 aa, Homo sapiens
KLNMNGIILYNWFCSLLLSLNIMLMRFIGLLFKAVFLAQRPCLLAKLHVCWVASVFKG

SEQ ID NO: 5581 - protein, 128 aa, Homo sapiens
MEESVVRPSVFVVDGQTDIPFTRLGRSHRRQSCSVARVGLGLLLLLMGAGLAVQGWFLLQLHWRLGEMVTRLPDGPAGSWEQLIQERRSHEVNPAAHLTVTTFGGHSEIRHRVKSGPVPGSPGQTASL

SEQ ID NO: 5582 - protein, 189 aa, Homo sapiens; identical to SEQ ID NO: 3273
  SITE (132): Xaa equals any amino acid
  SITE (163): Xaa equals any amino acid
  SITE (168): Xaa equals any amino acid

SEQ ID NO: 5583 - protein, 277 aa, Homo sapiens
MCVGARRLGRGPCAALLLLGLGLSTVTGLHCVGDTYPSNDRCCHECRPGNGMVSRCSRSQNTVCRPCGPGFYNDVVSSKPCKPCTWCNLRSGSERKQLCTATQDTVCRCRAGTQPLDSYKPGVDCAPCPPGHFSPGDNQACKPWTNCTLAGKHTLQPASNSSDAICEDRDPPATQPQETQGPPARPITVQPTEAWPRTSQGPSTRPVEVPGGRAVAAILGLGLVLGLLGPLAILLALYLLRRDQRLPPDAHKPPGGGSFRTPIQEEQADAHSTLAKI

SEQ ID NO: 5584 - protein, 277 aa, Homo sapiens; identical to SEQ ID NO: 5583

SEQ ID NO: 5585 - protein, 22 aa, Homo sapiens
FLQRPGPAPMQPRQALAQSRHS

SEQ ID NO: 5586 - protein, 98 aa, Homo sapiens
APSGPPAFPVLGEQRGPAVATGSVKEKGHEGAAGTVTAKPATGVRPVASVALATLRQNATPAIWYVRLVLAPVPDAQDLRNQTVCNARRAGPCITSSV

SEQ ID NO: 5587 - protein, 415 aa, Homo sapiens; identical to SEQ ID NO: 4286

SEQ ID NO: 5588 - protein, 387 aa, Homo sapiens
PKGLVPAVLWGLSLFLNLPGPIWLQPSPPPQSSPPPQPHPCHTCRGLVDSFNKGLERTIRDNFGGGNTAWEEENLSKYKDSETRLVEVLEGVCSKSDFECHRLLELSEELVESWWFHKQQEAPDLFQWLCSDSLKLCCPAGTFGPSCLPCPGGTERPCGGYGQCEGEGTRGGSGHCDCQAGYGGEACGQCGLGYFEAERNASHLVCSACFGPCARCSGPEESNCLQCKKGWALHHLKCVDCAKACLGCMGAGPGRCKKCSPGYQQVGSKCLDVDECETEVCPGENKQCENTEGGYRCICAEGYKQMEGICVKEQIPESAGFFSEMTEDELVVLQQMFFGIIICALATLAAKGDLVFTAIFIGAVAAMTGYWLSERSDRVLEGFIKGR

SEQ ID NO: 5589 - protein, 360 aa, Homo sapiens
  SITE (121): Xaa equals any amino acid
AQHVHPLQGSASTLWGPDYRLMAEASSDPGAEEREELLGPTAQWSVEDEEEAVHEQCQHERDRQLQAQDEEGGGHVPERPKQEMLLSLKPSEAPELDEDEGFGDWSQRPEQRQQHEGAQGXLDSGEPPQCRSPEGEQEDRPGLHAYEKEDSDEVHLEELSLSKEGPGPEDTVQDNLGAAGAEEEQEEHQKCQQPRTPSPLVLEGTIEQSSPPLSPTTKLIDRTESLNRSIEKSNSVKKSQPDLPISKIDQWLEQYTQAIETAGRTPKLARQASIELPSMAVASTKSRWETGEVQAQSAAKTPSCKDIVAGDMSKKSLWEQKGGSKTSSTIKSTPSGKRYKFVATGHGKYEKVLVEGGPAP

SEQ ID NO: 5590 - protein, 35 aa, Homo sapiens; identical to SEQ ID NO: 3942

SEQ ID NO: 5591 - protein, 71 aa, Homo sapiens
  SITE (4): Xaa equals any amino acid
  SITE (5): Xaa equals any amino acid
NFMXXVGVECFSQSLLGLTYTRENTFKCLQSEIKSHMHLDWFVLLGCSLLSFSSCVMVNCVKLCFPLNYEP

SEQ ID NO: 5592 - protein, 185 aa, Homo sapiens
RFPTSRAPGAFLKNPPVKCGGQPGLESKPLKMADDLDFETGDAGASATFPMQCSALRKNGFVVLKGRPCKIVEMSTSKTGKHGHAKVHLVGIDIFTGKKYEDICPSTHNMDVPNIKRNDFQLIGIQDGYLSLLQDSGEVREDLRLPEGDLGKEIEQKYDCGEEILITVLSAMTEEAAVAIKAMAK

SEQ ID NO: 5593 - protein, 371 aa, Homo sapiens
  SITE (277): Xaa equals any amino acid
MGRLVLLWGAAVFLLGGWMALGQGGAAEGVQIQIIYFNLETVQVTWNASKYSRTNLTFHYRFNGDEAYDQCTNYLLQEGHTSGCLLDAEQRDDILYFSIRNGTHPVFTASRWMVYYLKPSSPKHVRFSWHQDAVTVTCSDLSYGDLLYEVQYRSPFDTEWQSKQENTCNVTIEGLDAEKCYSFWVRVKAMEDVYGPDTYPSDWSEVTCWQRGEIRDACAETPTPPKPKLSKFILISSLAILLMVSLLLLSLWKLWRVKKFLIPSVPDPKSIFPGLFXIHQGNFQEWITDTQNVAHLHKMAGAEQESGPEEPLVVQLAKTEAESPRMLDPQTEEKEASGGSLQLPHQPLQGGDVVTIGGFTFVMNDRSYVAL

SEQ ID NO: 5594 - protein, 41 aa, Homo sapiens; identical to SEQ ID NO: 3944

SEQ ID NO: 5595 - protein, 66 aa, Homo sapiens
AKIKIKSLLILLSAFIFFIQIKLFFSLKKKKKSWVQWPTSVVPAALEAEVRGSLEPRSYKPPWATY

SEQ ID NO: 5596 - protein, 64 aa, Homo sapiens
  SITE (62): Xaa equals any amino acid
MCTHKRVAALQFFFSFLLLQITTILLCLSRNLTIAGTSYEWNHVVFVLFCLGYFSKHKIFKXHL

SEQ ID NO: 5597 - protein, 54 aa, Homo sapiens; identical to SEQ ID NO: 3946

SEQ ID NO: 5598 - protein, 54 aa, Homo sapiens; identical to SEQ ID NO: 3946

SEQ ID NO: 5599 - protein, 284 aa, Homo sapiens
MKTSAELHEQEKPPSSPRATGPGRLGHARGRGPDALRGGAAGPGRASSGAPRERKMAPHGPGSLTTLVPWAAALLLALGVERALALPEICTQCPGSVQNLSKVAFYCKTTRELMLHARCCLNQKGTILGLDLQNCSLEDPGPNFHQAHTTVIIDLQANPLKGDLANTFRGFTQLQTLILPQHVNCPGGINAWNTITSYIDNQICQGQKNLCNNTGDPEMCPENGSCVPDGPGLLQCVCADGFHGYKCMRQGSFSLLMFFGILGATTLSVSILLWATQRRKAKTS

SEQ ID NO: 5600 - protein, 34 aa, Homo sapiens; identical to SEQ ID NO: 3949

SEQ ID NO: 5601 - protein, 246 aa, Homo sapiens
MAFLRSMWGVLSALGRSGAELCTGCGSRLRSPFSFVYLPRWFSSVLASCPKKPVSSYLRFSKEQLPIFKAQNPDAKTTELIRRIAQRWRELPDSKKKIYQDAYRAEWQVYKEEISRFKEQLTPSQIMSLEKEIMDKHLKRKAMTKKKELTLLGKPKRPRSAYNVYVAERFQEAKGDSPQEKLKTVKENWKNLSDSEKELYIQHAKEDETRYHNEMKSWEEQMIEVGRKDLLRRTIKKQRKYGAEEC

SEQ ID NO: 5602 - protein, 84 aa, Homo sapiens
QALVFLYKKEKQKIDYCGLHDINKQMVISKQRIPQSSVCCHNLQFSLTVHPIYICILILFKLYVQGFACIYMVLREKKCYKLQI

SEQ ID NO: 5603 - protein, 229 aa, Homo sapiens
  SITE (146): Xaa equals any amino acid
  SITE (173): Xaa equals any amino acid
  SITE (176): Xaa equals any amino acid
  SITE (194): Xaa equals any amino acid
  SITE (213): Xaa equals any amino acid
MYFFGMASSIWWVILTLTWFLAAGLKWGHEAIEMHSSYFHIAAWAIPAVKTIVILIMRLVDADELTGLCYVGNQNLDALTGFVVAPLFTYLVIGTLFIAAGLVALFKIRSNLQKDGTKTDKLERLMVKIGVFSVLYTVPATCVIAXYFYEISNWALFRYSADDSNMAVEMLKXFMXLLVGITSGMWIWSAKTLXTWQKCSNRLVNSGKVKREXRGNGWVKPGKGSETVV

SEQ ID NO: 5604 - protein, 344 aa, Homo sapiens
ASASHITSGHLRCFPGSEGVGTMARCFSLVLLLTSIWTTRLLVQGSLRAEELSIQVSCRIMGITLVSKKANQQLNFTEAKEACRLLGLSLAGKDQVETALKASFETCSYGWVGDGFVVISRISPNPKCGKNGVGVLIWKVPVSRQFAAYCYNSSDTWTNSCIPEIITTKDPIFNTQTATQTTEFIVSDSTYSVASPYSTIPAPTTTPPAPASTSIPRRKKLICVTEVFMETSTMSTETEPFVENKAAFKNEAAGFGGVPTALLVLALLFFGAAAGLGFCYVKRYVKAFPFTNKNQQKEMIETKVVKEEKANDSNPNEESKKTDKNPEESKSPSKTTVRCLEAEV

SEQ ID NO: 5605 - protein, 114 aa, Homo sapiens; identical to SEQ ID NO: 3952

SEQ ID NO: 5606 - protein, 92 aa, Homo sapiens; identical to SEQ ID NO: 3574

SEQ ID NO: 5607 - protein, 60 aa, Homo sapiens
MGSTWGSPGWVRLALCLTGLVLSLYALHVKAARARDRDYRALCDVGTAISCSRVFSSSYC

SEQ ID NO: 5608 - protein, 74 aa, Homo sapiens [sequence omitted]

SEQ ID NO: 5609 - protein, 74 aa, Homo sapiens [sequence omitted]

SEQ ID NO: 5610 - protein, 7 aa, Homo sapiens
MIRCGDS

SEQ ID NO: 5611 - protein, 99 aa, Homo sapiens
MAWAVTLILSLSRAVRTQEVPMALQAHSGIQLASRVGLPGPWPECSTLSSSSSSETPWITVFEEVGEPVAEVPTHDLALLVEVATREAGERLLIHRELQ

SEQ ID NO: 5612 - protein, 60 aa, Homo sapiens; identical to SEQ ID NO: 3956

SEQ ID NO: 5613 - protein, 27 aa, Homo sapiens
WLVSYIFSWVCWSPFPYDLLENSKESL

SEQ ID NO: 5614 - protein, 60 aa, Homo sapiens; identical to SEQ ID NO: 3956

SEQ ID NO: 5615 - protein, 30 aa, Homo sapiens; identical to SEQ ID NO: 3958

SEQ ID NO: 5616 - protein, 31 aa, Homo sapiens; identical to SEQ ID NO: 3959

SEQ ID NO: 5617 - protein, 284 aa, Homo sapiens
GVRMASRGRRPEHGGPPELFYDETEARKYVRNSRMIDIQTRMAGRALELLYLPENKPCYLLDIGCGTGLSGSYLSDEGHYWVGLDISPAMLDEAVDREIEGDLLLGDMGQGIPFKPGTFDGCISISAVQWLCNANKKSENPAKRLYCFFASLFSVLVRGSRAVLQLYPENSEQLELITTQATKAGFSGGMVVDYPNSAKAKKFYLCLFSGPSTFIPEGLSENQDEVEPRESVFTNERFPLRMSRRGMVRKSRAWVLEKKERHRRQGREVRPDTQYTGRKRKPRF

SEQ ID NO: 5618 - protein, 29 aa, Homo sapiens
MVPQLGAGHASRSVAPALALSPAAAPGRA

SEQ ID NO: 5619 - protein, 6 aa, Homo sapiens
PKAGRG

SEQ ID NO: 5620 - protein, 29 aa, Homo sapiens
MVPQLGAGHASRSVAPALALFPAAAPGRA

SEQ ID NO: 5621 - protein, 29 aa, Homo sapiens
MVPQLGAGHASRSVAPALALSPAAAPGRA

SEQ ID NO: 5622 - protein, 6 aa, Homo sapiens
SPPLLT

SEQ ID NO: 5623 - protein, 494 aa, Homo sapiens
MARAPPLLAALTALLAAAAAGGDAPPGKIAVVGAGIGGSAVAHFLQQHFGPRVQIDVYEKGTVGGRLATISVNKQHYESGAASFHSLSLHMQDFVKLLGLRHRREVVGRSAIFGGEHFMLEETDWYLLNLFRLWWHYGISFLRLQMWVEEVMEKFMRIYKYQAHGYAFSGVEELLYSLGESTFVNMTQHSVAESLLQVGVTQRFIDDVVSAVLRASYGQSAAMPAFAGAMSLAGAQGSLWSVEGGNKLVCSGLLKLTKANVIHATVTSVTLHSTEGKALYQVAYENEVGNSSDFYDIVVIATPLHLDNSSSNLTFAGFHPPIDDVQGSFQPTVVSLVHGYLNSSYFGFPDPKLFPFANILTTDFPSFFCTLDNICPVNISASFRRKQPQEAAVWRVQSPKPLFRTQLKTLFRSYYSVQTAEWQAHPLYGSRPTLPRFALHDQLFYLNALEWAASSVEVMAVAAKNVALLAYNRWYQDLDKIDQKDLMHKVKTEL

SEQ ID NO: 5624 - protein, 64 aa, Homo sapiens
MARAPPLLAALTALLAAAAAGGDAPPGKIAVVGAGIGGSAVAHFLQQHFGPRVQIDVYEKGTWV

SEQ ID NO: 5625 - protein, 142 aa, Homo sapiens
MARAPPLLAALTALLAAAAAGGDAPPGKIAVVGAGIGGSAVAHFLQQHFGPRVQIDVYEKGTVGGRLATISVNKQHYESGAASFHSLSLHMQDFVKLLGLRHRREVVGRNAIFGGEHFMLEETDWYLLNLFRLWLAIWQSVP

SEQ ID NO: 5626 - protein, 48 aa, Homo sapiens; identical to SEQ ID NO: 3967

SEQ ID NO: 5627 - protein, 15 aa, Homo sapiens
MGVWPIRLMTLTSAP

SEQ ID NO: 5628 - protein, 34 aa, Homo sapiens
  SITE (29): Xaa equals any amino acid
  SITE (32): Xaa equals any amino acid
  SITE (34): Xaa equals any amino acid
IGVWCKPQCFGWQQRYPTSLGKPLRTMLXVCXLX

SEQ ID NO: 5629 - protein, 245 aa, Homo sapiens
  SITE (12): Xaa equals any amino acid
  SITE (28): Xaa equals any amino acid
  SITE (226): Xaa equals any amino acid
  SITE (232): Xaa equals any amino acid
  SITE (242): Xaa equals any amino acid
TTPSLKERNRKXELHRGGGRSRTSGSPXLHLQISWGGWALAAGLPGIIMLLVTPLVIYTMYPPEIKKVDNKTIAKAGLAELGPMKIREKMLLGVFVLALLGWIFSKSLGVDESTVAIVVMATMLLLGIVTWEDVVKNKGGWNTLIWYGGIIGLSSLLSKVKFFEWLAEVFKNNLAFDGHGNVAFFVIIFLSIIVRYFFAMQWKLANYSSSINRSLILTPAPFWARXRCAVGXLRKRGAPVPXFPP

SEQ ID NO: 5630 - protein, 60 aa, Homo sapiens; identical to SEQ ID NO: 3968

SEQ ID NO: 5631 - protein, 131 aa, Homo sapiens
GRTGVSCRSQPVSLFPLFFFLISFLGCLSAFLSACFASTFSCVLGSPETSFSPCLHPPPKVLSSHPHPLQPSMPQPPKGPHCQSMPAHPRCALVSVYVCVCVCLGGGGWVAGDWALFLPVEEGVQCTSPLN

SEQ ID NO: 5632 - protein, 62 aa, Homo sapiens
  SITE (12): Xaa equals any amino acid
  SITE (18): Xaa equals any amino acid
  SITE (39): Xaa equals any amino acid
  SITE (44): Xaa equals any amino acid
MLLVLSLCLYSXAMLVTXLIFLVRTTHLPFSTDKAIAIXVAVSXAGLLVHAVPPAVDPCSVP

SEQ ID NO: 5633 - protein, 196 aa, Homo sapiens
IILIVELCGLQARFPLSWRNFPITFACYAALFCLSASIIYPTTYVQFLSHGRSRDHAIAATFFSCIACVAYATEVAWTRARPGEITGYMATVPGLLKVLETFVACIIFAFISDPNLYQHQPALEWCVAVYAICFILAAIAILLNLGECTNVLPIPFPSFLSGLALLSVLLYATALVLWPLYQFDEKYGGSLGAREM

SEQ ID NO: 5634 - protein, 317 aa, Homo sapiens
MAGDWHWALRVTPGLGVVAVLLLFLVVREPPRGAVERHSDLPPLNPTSWWADLRALARNPSFVLSSLGFTAVAFVTGSLALWAPAFLLRSRVVLGETPPCLPGDSCSSSDSLIFGLITCLTGVLGVGLGVEISRRLRHSNPRADPLVCATGLLGSAPFLFLSLACARGSIVATYIFIFIGETLLSMNWAIVADILLYVVIPTRRSTAEAFQIVLSHLLGDAGSPYLIGLISDRLRRNWPPSFLSEFRALQFSLMLCAFVGALGGAAFLGTAIFIEADRRRAQLHVQGLLHEAGSTDDRIVVPQRGRSTRVPVASVLI

SEQ ID NO: 5635 - protein, 81 aa, Homo sapiens; identical to SEQ ID NO: 3972

SEQ ID NO: 5636 - protein, 75 aa, Homo sapiens; identical to SEQ ID NO: 3973

SEQ ID NO: 5637 - protein, 68 aa, Homo sapiens; identical to SEQ ID NO: 4975
  SITE (12): Xaa equals any amino acid

SEQ ID NO: 5638 - protein, 235 aa, Homo sapiens; identical to SEQ ID NO: 4246

SEQ ID NO: 5639 - protein, 233 aa, Homo sapiens
  SITE (2): Xaa equals any amino acid
  SITE (208): Xaa equals any amino acid
  SITE (221): Xaa equals any amino acid
MXWTPLLLPLLTFCTVSVASYELTQPPSVSVSPGQTARITCSGDELPKTYAFWYQQKSGQAPVLVIYADNKRPSRIPERFSGSSSGTVATLTISGAQVEDAADYYCYSTDSSGNHGVFGTGTKVTVLGQPKANPTVTLFPPSSEELQANKATLVCLISDFYPGAVTVAWKADGSPVKAGVETTKPSKQSNNKYAASSYLSLTPEQWKXHRSYSCQVTHEGXTVEKTVAPTECS

SEQ ID NO: 5640 - protein, 1 aa, Homo sapiens
L

SEQ ID NO: 5641 - protein, 235 aa, Homo sapiens; identical to SEQ ID NO: 4248

SEQ ID NO: 5642 - protein, 65 aa, Homo sapiens; identical to SEQ ID NO: 3977

SEQ ID NO: 5643 - protein, 101 aa, Homo sapiens [sequence omitted]

SEQ ID NO: 5644 - protein, 101 aa, Homo sapiens [sequence omitted]

SEQ ID NO: 5645 - protein, 270 aa, Homo sapiens
GHLCARPETAHLQVRPGPLPSSFSGMDVGPSSLPHLGLKLLLLLLLLPLRGQANTGCYGIPGMPGLPGAPGKDGYDGLPGPKGEPGIPAIPGIRGPKGQKGEPGLPGHPGKNGPMGPPGMPGVPGPMGIPGEPGEEGRYKQKFQSVFTVTRQTHQPPAPNSLIRFNAVLTNPQGDYDTSTGKFTCKVPGLYYFVYHASHTANLCVLLYRSGVKVVTFCGHTSKTNQVNSGGVLLRLQVGEEVWLAVNDYYDMVGIQGSDSVFSGFLLFPD

SEQ ID NO: 5646 - protein, 227 aa, Homo sapiens
LLLLPLRGQANTGCYGIPGMPGLPGAPGKDGYDGLPGPKGEPGIPAIPGIRGPKGQKGEPGLPGHPGKNGPMGPPGMPGVPGPMGIPGEPGEEGRYKQKFQSVFTVTRQTHQPPAPNSLIRFNAVLTNPQGDYDTSTGKFTCKVPGLYYFVYHASHTANLCVLLYRSGVKVVTFCGHTSKTNQVNSGGVLLRLQVGEEVWLAVNDYYDMVGIQGSDSVFSGFLLFPD

SEQ ID NO: 5647 - protein, 335 aa, Homo sapiens [sequence omitted]

SEQ ID NO: 5648 - protein, 63 aa, Homo sapiens
LWSVGWVGQWLPTLSTASPTPRIFGESVPHMSSLLDCELLEGRDRALCLCVISFWHINASIKI

SEQ ID NO: 5649 - protein, 94 aa, Homo sapiens
LLLLPLRGQANTGCYGIPGMPGLPGAPGKDGYDGLPGPKGEPGIPAIPGIRGPKGQIQAEIPVSVHGHSADPPAPCTQQPDQIQRGPHQPAGRL

SEQ ID NO: 5650 - protein, 159 aa, Homo sapiens
VLCWEIRCSLQSWQAGTFTSAEAAPTAASSARSSVPERWEFYLLAPDWGCCLSFRDALSREEESREAVWLWQLCRAVVGSAQFELPRSFVYTVRGKPPTQASVMVDASPHTKLESPRSTSDCCAGSKNFKPVDFSLLGSVAVGSTDPLGSLASVPFPGE

SEQ ID NO: 5651 - protein, 7 aa, Homo sapiens
SFSFIFL

SEQ ID NO: 5652 - protein, 32 aa, Homo sapiens
NRKTLETLPLSSHHISRTLTSQVSLFTPFHTS

SEQ ID NO: 5653 - protein, 32 aa, Homo sapiens; identical to SEQ ID NO: 5652

SEQ ID NO: 5654 - protein, 144 aa, Homo sapiens
  SITE (106): Xaa equals any amino acid
  SITE (117): Xaa equals any amino acid
  SITE (134): Xaa equals any amino acid
MQGALQVLSLGSGPDVGSSAPSELSPNSSGCLCGFLHPALMLFFDKFANIVPFDSWDQLMRQLDLTKNEIDVVRAGTAGPGDALYAMLMKWVNKTGRNASIHTLLXALERMEERHAXEKIQDLLVDSGKFIYLXDGTGSAVSLE

SEQ ID NO: 5655 - protein, 14 aa, Homo sapiens
MIPISFLNFFFFFF

SEQ ID NO: 5656 - protein, 14 aa, Homo sapiens
MIPISFLNFFFFFF

SEQ ID NO: 5657 - protein, 30 aa, Homo sapiens
  SITE (26): Xaa equals any amino acid
  SITE (27): Xaa equals any amino acid
LEILKIYLAILKKKKKKKTRGGARYXXRPK

SEQ ID NO: 5658 - protein, 12 aa, Homo sapiens
MEIILILLILMD

SEQ ID NO: 5659 - protein, 37 aa, Homo sapiens
LLIRLLASHACIKSGKTKWRKRIQSTENPFFQQNKVQ

SEQ ID NO: 5660 - protein, 347 aa, Homo sapiens
  SITE (93): Xaa equals any amino acid
  SITE (229): Xaa equals any amino acid
  SITE (292): Xaa equals any amino acid
STHASDYFDYWGQGTLVTVSSASTKGPSVFPLAPCSRSTSESTAALGCLVKDYFPEPVTVSWNSGALTSGVHTFPAVLQSSGLYSLSSVVTVXSSNFGTQTYTCNVDHKPSNTKVDKTVERKCCVECPPCPAPPVAGPSVFLFPPKPKDTLMISRTPEVTCVVVDVSHEDPEVQFNWYVDGMEVHNAKTKPREEQFNSTFRVVSVLTVVHQDWLNGKEYKCKVSNKGLXAPIEKTISKTKGQPREPQVYTLPPSREEMTKNQVSLTCLVKGFYPSDIAVEWESNGQPENNYXTTPPMLDSDGSFFLYSKLTVDKSRWQQGNVFSCSVMHEALHNHYTQKSLSLSPGK

SEQ ID NO: 5661 - protein, 422 aa, Homo sapiens
  SITE (377): Xaa equals any amino acid
  SITE (391): Xaa equals any amino acid
  SITE (413): Xaa equals any amino acid
  SITE (422): Xaa equals any amino acid
LSCAGSGFAFSDYALQWVRQAPGKGLEWVAFISYEGNNKQYEDSVKGRFSISRDNSNNSVFLEMNSLKSEDTAVYYCVRDRSGRGTDYFDYWGRGTLVTVSSASTKGPSVFPLAPSSKSTSGGTAALGCLVKDYFPEPVTVSWNSGALTSGVHTFPAVLQSSGLYSLSSVVTVPSSSLGTQTYICNVNHKPSNTKVDKKVEPKSCDKTHTCPPCPAPELLGGPSVFLFPPKPKDTLMISRTPEVTCVVVDVSHEDPEVKFNWYVDGVEVHNAKTKPREEQYNSTYRVVSVLTVLHQDWLNGKEYKCKVSNKALPAPIEKTISKAKGQPREPQVYTLPPSRDELTKNQVSLTCLVKGFYPSDIAVEWESNGQPENNYXTTPSVLDFRRVLSXFYSKGSPWTKKQVGSRGKPSFXCFRGWHEGX

SEQ ID NO: 5662 - protein, 93 aa, Homo sapiens
  SITE (84): Xaa equals any amino acid
DSVLNKQTNKQTKTKTFSWLGVTMPVIAALWEAEVGGSLEARSSRPVWANNETLSLLKIKKITSRVWWCVPVVPATQETETGGXLELRRLRLQ

SEQ ID NO: 5663 - protein, 298 aa, Homo sapiens; identical to SEQ ID NO: 3987

SEQ ID NO: 5664 - protein, 298 aa, Homo sapiens; identical to SEQ ID NO: 3987

SEQ ID NO: 5665 - protein, 298 aa, Homo sapiens; identical to SEQ ID NO: 3987

SEQ ID NO: 5666 - protein, 178 aa, Homo sapiens
MWFLVLCLALSLGGTGAAPPIQSRIVGGWECEQHSQPWQAALYHFSTFQCGGILVHRQWVLTAAHCISDNYQLWLGRHNLFDDENTAQFVHVSESFPHPGFNMSLLENHTRQADEDYSHDLMLLRLTEPADTITDAVKVVELPTQEPEVGSTCLASGWGSIEPENFSFPDDLQCVDLK

SEQ ID NO: 5667 - protein, 226 aa, Homo sapiens
MGGGTRHVQSQSQSCTIAVRLALFRAGARCREGARRTGLALGVLRGCTRSDHSSTRRTRSVFQTKSSMSKEACATPTCPVVCCMTSPCFLFPFSTEHVAIPTALEIVPKLCIVPRRARATRRRRIAPTRPLHKCSRRTLSTHQPFSCFSISPWICRCFSHSAYSRHRQQGRQRQHQAQQRQAWPLQRPHGPCWSRAERGSARTQDPAVPDRHATRTRGRTRGRTRG

SEQ ID NO: 5668 - protein, 300 aa, Homo sapiens; identical to SEQ ID NO: 4601

SEQ ID NO: 5669 - protein, 177 aa, Homo sapiens; identical to SEQ ID NO: 3257

SEQ ID NO: 5670 - protein, 43 aa, Homo sapiens
  SITE (1): Xaa equals any amino acid
  SITE (4): Xaa equals any amino acid
  SITE (9): Xaa equals any amino acid
XIGXSLGTXSVSWVLGTSSYPTPVQSVPPYSCAWVGWHVSEVY

SEQ ID NO: 5671 - protein, 68 aa, Homo sapiens
LACPNYRSLRICLGQDRPSVVFAIPLTVLKTKVLRGETPLFISVGVFYIQKCMFFFLFKIKVFGTELH

SEQ ID NO: 5672 - protein, 81 aa, Homo sapiens
  SITE (15): Xaa equals any amino acid
  SITE (18): Xaa equals any amino acid
  SITE (21): Xaa equals any amino acid
  SITE (23): Xaa equals any amino acid
  SITE (32): Xaa equals any amino acid
  SITE (37): Xaa equals any amino acid
  SITE (44): Xaa equals any amino acid
SFAKGGALVFKKKGXPLXRHXPXQLKYKVGVXVVFAXPLTVLKXKVLRGETPLFISVGVFYIQKCMFFFLFKIKVFGTELH

SEQ ID NO: 5673 - protein, 141 aa, Homo sapiens [sequence omitted]

SEQ ID NO: 5674 - protein, 258 aa, Homo sapiens; identical to SEQ ID NO: 4729

SEQ ID NO: 5675 - protein, 406 aa, Homo sapiens; identical to SEQ ID NO: 5478
  SITE (364): Xaa equals any amino acid

SEQ ID NO: 5676 - protein, 5 aa, Homo sapiens
MKALC

SEQ ID NO: 5677 - protein, 180 aa, Homo sapiens; identical to SEQ ID NO: 3999

SEQ ID NO: 5678 - protein, 53 aa, Homo sapiens
  SITE (4): Xaa equals any amino acid
  SITE (36): Xaa equals any amino acid
MDWXHNLTVSSYHFHLPGDWASPGAPKARGRGKGGXGPWPLALTRCHWTWCHG

SEQ ID NO: 5679 - protein, 81 aa, Homo sapiens
  SITE (32): Xaa equals any amino acid
MVVLPGQEGVLGTHKAGGVAAGLRARGLQVVXRWAASATKQTNLLVEVTGTVTPGATSAALARAPSSTRRSAAATARSPAA

SEQ ID NO: 5680 - protein, 298 aa, Homo sapiens; identical to SEQ ID NO: 4001

SEQ ID NO: 5681 - protein, 68 aa, Homo sapiens
TQNYQCFRNMSPDCVSKSTNIISTIKYVLKSSCLCVQNTYLFPFLSICFCFPYLECQMFFSYLPICQS

SEQ ID NO: 5682 - protein, 298 aa, Homo sapiens; identical to SEQ ID NO: 4001

SEQ ID NO: 5683 - protein, 211 aa, Homo sapiens [sequence omitted]

SEQ ID NO: 5684 - protein, 552 aa, Homo sapiens
  SITE (533): Xaa equals any amino acid
MTRGGPGGRPGLPQPPPLLLLLLLPLLLVTAEPPKPAGVYYATAYWMPAEKTVQVKNVMDKNGDAYGFYNNSVKTTGWGILEIRAGYGSQTLSNEIIMFVAGFLEGYLTAPHMNDHYTNLYPQLITKPSIMDKVQDFMEKQDKWTRKNIKEYKTDSFWRHTGYVMAQIDGLYVGAKKRAILEGTKPMTLFQIQFLNSVGDLLDLIPSLSPTKNGSLKVFKRWDMGHCSALIKVLPGFENILFAHSSWYTYAAMLRIYKHWDFNIIDKDTSSSRLSFSSYPGFLESLDDFYILSSGLILLQTTNSVFNKTLLKQVIPETLLSWQRVRVANMMADSGKRWADIFSKYNSGTYNNQYMVLDLKKVKLNHSLDKGTLYIVEQIPTYVEYSEQTDVLRKGYWPSYNVPFHEKIYNWSGYPLLVQKLGLDYSYDLAPRAKIFRRDQGKVTDTASMKYIMRYNNYKKDPYSRGDPCNTICCREDLNSPNPSPGGCYDTKVADIYLASQYTSYAISGPTVQGGLPVFRWDRFNKTLHQGMXEVYNFDFITMKPILKLDIK

SEQ ID NO: 5685 - protein, 552 aa, Homo sapiens [sequence omitted]

SEQ ID NO: 5686 - protein, 31 aa, Homo sapiens
  SITE (28): Xaa equals any amino acid
IKMWFQIFKVLAIFGLKMMHHYQLEYPXFEF

SEQ ID NO: 5687 - protein, 167 aa, Homo sapiens
DGSTFGCVQHRSRAVEGGMHPQLIPSVIAVVFILLLGVCFIASCLVTHHNFSRCKRGTGVHKLEHHAKLKCIKEKSELKSAEGSTWNCCPIDWRAFQSNCYFPLTDNKTWAESERNCSGMGAHLMTISTEAEQNFIIQFLDRRLSYFLGLRDENAKGQWRWVGPDAI

SEQ ID NO: 5688 - protein, 9 aa, Homo sapiens
MCVCVCVCV

SEQ ID NO: 5689 - protein, 3 aa, Homo sapiens
ICL

SEQ ID NO: 5690 - protein, 77 aa, Homo sapiens; identical to SEQ ID NO: 4008

SEQ ID NO: 5691 - protein, 77 aa, Homo sapiens; identical to SEQ ID NO: 4008

SEQ ID NO: 5692 - protein, 31 aa, Homo sapiens
  SITE (2): Xaa equals any amino acid
MXYNYFLAFSPLGCELLPVLCLAVAFLITNC

SEQ ID NO: 5693 - protein, 249 aa, Homo sapiens
PAMGAAVFFGCTFVAFGPAFALFLITVAGDPLRVIILVAGAFFWLVSLLLASVVWFILVHVTDRSDARLQYGLLIFGAAVSVLLQEVFRFAYYKLLKKADEGLASLSEDGRSPISIRQMAYVSGLSFGIISGVFSVINILADALGPGVVGIHGDSPYYFLTSAFLTAAIILLHTFWGVVFFDACERRRYWALGLVVGSHLLTSGLTFLNPWYEASLLPIYAVTVSMGLWAFITAGGSLRSIQRSLLCKD

SEQ ID NO: 5694 - protein, 394 aa, Homo sapiens
  SITE (5): Xaa equals any amino acid
  SITE (8): Xaa equals any amino acid
  SITE (185): Xaa equals any amino acid
  SITE (200): Xaa equals any amino acid
  SITE (225): Xaa equals any amino acid
  SITE (227): Xaa equals any amino acid
  SITE (229): Xaa equals any amino acid
  SITE (301): Xaa equals any amino acid
  SITE (304): Xaa equals any amino acid
  SITE (328): Xaa equals any amino acid
KYACXVAXPEIPGSTHASGAVGSRQINMESIFHEKQEGSLCAQHCLNNLLQGEYFSPVELSSIAHQLDEEERMRMAEGGVTSEDYRTFLQQPSGNMDDSGFFSIQVISNALKVWGLELILFNSPEYQRLRIDPINERSFICNYKEHWFTVRKLGKQWFNLNSLLTGPELISDTYLALFLAQLQQXGYSIFVVKGDLPDCXADQLLQMIRVQQMHRPKLIGEELAXLXEXRVHKTDLERMLEANDGSGMLDEDEEDLQRALALSRQEIDMEDEEADLRRAIQLSMQGSSRNISQDMTQTSGXNLXSEELRKRREAYFEKQQQKQQQQQXQQQQQQQQQQGDLSGQSSHPCERPATSSGALGSDLGDAMSEEDMLQAAVTMSLETVRNDLKTEGKK

SEQ ID NO: 5695 - protein, 105 aa, Homo sapiens
  SITE (12): Xaa equals any amino acid
SMQGSSRTYLKXDTDIRYNLTSEELRKRREAYFEKQQQKQQQQQQQQQQGDLSGQSSHPCERPATSSGALGSDLGDAMSEEDMLQAAVTMSLETVRNDLKTEGKK

SEQ ID NO: 5696 - protein, 85 aa, Homo sapiens [sequence omitted]

SEQ ID NO: 5697 - protein, 85 aa, Homo sapiens [sequence omitted]

SEQ ID NO: 5698 - protein, 112 aa, Homo sapiens
LCHEGSALVNELMTLPWEWVPDKRIWLLSLTLVHALLPLCLLPWDVGARSPSSVVSPSTLDFPTSRTVNKFLFKLPSLWYSVIATQNGLKQKIRETFLFVQFSQMPRWHKLE

SEQ ID NO: 5699 - protein, 1 aa, Homo sapiens
S

SEQ ID NO: 5700 - protein, 12 aa, Homo sapiens
MWQCDPLTCGVT

SEQ ID NO: 5701 - protein, 55 aa, Homo sapiens; identical to SEQ ID NO: 4014

SEQ ID NO: 5702 - protein, 69 aa, Homo sapiens [sequence omitted]

SEQ ID NO: 5703 - protein, 69 aa, Homo sapiens [sequence omitted]

SEQ ID NO: 5704 - protein, 169 aa, Homo sapiens
AALGGTATRQNNWPPLPSFCPVQPCFFQDISMEIPQEFQKTVSTMYYLWMCSTLALLLNFLACLASFCVETNNGAGFGLSILWVLLFTPCSFVCWYRPMYKAFRSDSSFNFFVFFFIFFVQDVLFVLQAIGIPGWGFSGWISALVVPKATQQYPCSCCWSPCSSLALLC

SEQ ID NO: 5705 - protein, 145 aa, Homo sapiens; identical to SEQ ID NO: 3435

SEQ ID NO: 5706 - protein, 144 aa, Homo sapiens
  SITE (3): Xaa equals any amino acid
  SITE (52): Xaa equals any amino acid
  SITE (73): Xaa equals any amino acid
VPXSILLHRTLSILHFPTVTRDSPTQQDLLPQALSLSSQATEYWPWCNFWFXQCFYRHQGYENSGPGFWTGLXTGGILGYLFGSNRAATPFSDSWYYPSYPPSYPGTWNRAYSPLHGGSGSYSVCSNSDTKTRTASGYGGTRRR

SEQ ID NO: 5707 - protein, 339 aa, Homo sapiens
MAAACGPGAAGYCLLLGLHLFLLTAGPALGWNDPDRMLLRDVKALTLHYDRYTTSRRLDPIPQLKCVGGTAGCDSYTPKVIQCQNKGWDGYDVQWECKTDLDIAYKFGKTVVSCEGYESSEDQYVLRGSCGLEYNLDYTELGLQKLKESGKQHGFASFSDYYYKWSSADSCNMSGLITIVVLLGIAFVVYKLFLSDGQYSPPPYSEYPPFSHRYQRFTNSAGPPPPGFKSEFTGPQNTGHGATSGFGSAFTGQQGYENSGPGFWTGLGTGGILGYLFGSNRAATPFSDSWYYPSYPPSYPGTWNRAYSPLHGGSGSYSVCSNSDTKTRTASGYGGTRRR

SEQ ID NO: 5708 - protein, 92 aa, Homo sapiens
HECLCSSMNDNSRPPLPHVLSFGGLLRAVPFSQGRSWEVRNHVFNLWLLLLLLLLRIWLYGWRTHPLPTTGVSFQATQDIFSFSPPHVPFFL

SEQ ID NO: 5709 - protein, 54 aa, Homo sapiens
MFLTCGCFCCCCSSVSGCMGGEPTPCPPQGSPSRPLRTFLASLLPMFPFFSKVP

SEQ ID NO: 5710 - protein, 324 aa, Homo sapiens; identical to SEQ ID NO: 4024

SEQ ID NO: 5711 - protein, 114 aa, Homo sapiens
  SITE (9): Xaa equals any amino acid
TSFLALWWXVCVCICIYTHIYINTQTHIYTNTRIHFRPQFLAHNSHSPCYTLLLQHWVCQASGDNHSNLLPFLLPAQDRTLIFPTFLMVGHKTHSRDGPTPYPARRNAAVMKLP

SEQ ID NO: 5712 - protein, 188 aa, Homo sapiens
MYLSGFLSSFLMKPINKCIGRNMTYFSGLLVILAFAAWVALAEGLGVAVYAAAVLLGAGCATILVTSLAMTADLIGPHTNSGAFVYGSMSFLDKVANGLAVMAIQSLHPCPSELCCRACVSFYHWAMVAVTGGVGVAAALCLCSLLLWPTRLRRSRGGEHRTPSEGEGISTAPPPCWNETQPQGGAKL

SEQ ID NO: 5713 - protein, 219 aa, Homo sapiens
  SITE (22): Xaa equals any amino acid
  SITE (96): Xaa equals any amino acid
MYLSGFLSSFLMKPINKCIGRXMTYFSGLLVILAFAAWVALAEGLGVAVYAAAVLLGAGCATILVTSLAMTADLIGPHTNSGAFVYGSMSFLDKVXNGLAVMAIQSLHPCPSELCCRACVSFYHWAMVAVTGGVGVAAALCLCSLLLWPTRLRRSFLAWRRGRGEDKGPGYSWIPTVLVQPPRPTSPFLWEAPLAWRCTRKKWSGAGTKPWPREDWGTH

SEQ ID NO: 5714 - protein, 161 aa, Homo sapiens; identical to SEQ ID NO: 4027

SEQ ID NO: 5715 - protein, 219 aa, Homo sapiens
MYLSGFLSSFLMKPINKCIGRNMTYFSGLLVILAFAAWVALAEGLGVAVYAAAVLLGAGCATILVTSLAMTADLIGPHTNSGAFVYGSMSFLDKVANGLAVMAIQSLHPCPSELCCRACVSFYHWAMVAVTGGVGVAAALCLCSLLLWPTRLRRSFLAWRRGRGEDKGPGYSWIPTVLVQPPRPTSPFLWEAPLAWRCTRKKWSGAGTKPWPREDWGTH

SEQ ID NO: 5716 - protein, 93 aa, Homo sapiens
MQRCQSILKVLFFWKQSLASLPSLVCSGAIMVPCSLDLLGSSNPPTSASQVAGTTDACHYVWLIFKFFVEASSHHIAQAGLDLLSSSKNTDFD

SEQ ID NO: 5717 - protein, 145 aa, Homo sapiens [sequence omitted]

SEQ ID NO: 5718 - protein, 74 aa, Homo sapiens; identical to SEQ ID NO: 4031

SEQ ID NO: 5719 - protein, 51 aa, Homo sapiens
AVVPTWCSTVLLTFVPTARLVAGLEDVQVYDGEDAVFSLDLSTIIQGTWFP

SEQ ID NO: 5720 - protein, 184 aa, Homo sapiens
LVRCLLLPPALGPGALPCRIPSLAVYLLSGSFSLVGWSHFNCFYTSQFKFSLNIFLLFFVKQTEPNASLCSWMPHSRNHACSPGPFAVLWASGGFPAIQAGLPPLRRLVPRVGGGLSRMPPGVRAWWAQFSLPLSLGEEEGLGGLRSWALGLSCPPLLLCEAADPSLPTEGLGLEASSRLPGES

SEQ ID NO: 5721 - protein, 329 aa, Homo sapiens
MGLLLLVPLLLLPGSYGLPFYNGFYYSNSANDQNLGNGHGKDLLNGVKLVVETPEETLFTYQGASVILPCRYRYEPALVSPRRVRVKWWKLSENGAPEKDVLVAIGLRHRSFGDYQGRVHLRQDKEHDVSLEIQDLRLEDYGRYRCEVIDGLEDESGLVELELRGVVFPYQSPNGRYQFNFHEGQQVCAEQAAVVASFEQLFRAWEEGLDWCNAGWLQDATVQYPIMLPRQPCGGPGLAPGVRSYGPRHRRLHRYDVFCFATALKGRVYYLEHPEKLTLTEAREACQEDDATIAKVGQLFAAWKFHGLDRCDAGWLQMAASATLWLPAS

SEQ ID NO: 5722 - protein, 209 aa, Homo sapiens; identical to SEQ ID NO: 4033

SEQ ID NO: 5723 - protein, 103 aa, Homo sapiens
  SITE (11): Xaa equals any amino acid
  SITE (92): Xaa equals any amino acid
MLFSLNYFLFXIVFSFCEFFYAHTKCFSSGPLVFAGPIFMNHREQALARLRSHPAQLKHKRDKHKGIWSSLSPRWDTFPISSTHLNFVSGKXHKPDSSTLLLS

SEQ ID NO: 5724 - protein, 75 aa, Homo sapiens
VAAWLLCPVKYRHLTLGVASVQLYITGMDGSDFLALFLNWPYTGSLASGLKALSKMTRVSSGDVGEGGFIFPLVV

SEQ ID NO: 5725 - protein, 187 aa, Homo sapiens
LTLIHRGRVHHCREYVNMQDPEMDMKSVTDRAARTLLWTELFRGLGMTLSYLFREPATINYPFEKGPLSPRFRGEHALRRYPSGEERCIACKLCEAICPAQAITIEAEPRADGSRRTTRYDIDMTKCIYCGFCQEACPVDAIVEGPNFEFSTETHEELLYNKEKLLNNGDKWEAEIAANIQADYLYR

SEQ ID NO: 5726 - protein, 199 aa, Homo sapiens; identical to SEQ ID NO: 4971

SEQ ID NO: 5727 - protein, 156 aa, Homo sapiens; identical to SEQ ID NO: 3387

SEQ ID NO: 5728 - protein, 92 aa, Homo sapiens; identical to SEQ ID NO: 5708

SEQ ID NO: 5729 - protein, 67 aa, Homo sapiens
MLGLWGQRLPAAWVLLLLPFLPLLLLAPPRPTARPTSRSSWCMGSSTARTASATCWNTSMRHTPGLW

SEQ ID NO: 5730 - protein, 113 aa, Homo sapiens
MDGMKCGPGLRCQPSNGEDPFGEEFGICKDCPYGTFGMDCRETCNCQSGICDRGTGKCLKFPFFQYSVTKSSNRFVSLTEHDMASGDGNIVREEVVKENAAGSPVMRKWLNPR

SEQ ID NO: 5731 - protein, 501 aa, Homo sapiens
  SITE (58): Xaa equals any amino acid
  SITE (454): Xaa equals any amino acid
MIKINKGKRFQQAVDAVEEFLRRAKGKDQTSSHNSSDDKNRRNSSEERSRPNSGDEKXKLSLSEGKVKKNMGEGKKRVSSGSSERGSKSPLKRAQEQSPRKRGRPPKDEKDLTIPESSTVKGMMAGPMAAFKWQPTASEPVKDADPHFHHFLLSQTEKPAVCYQAITKKLKICEEETGSTSIQAADSTAVNGSITPTDKKIGFLGLGLMGSGIVSNLLKMGHTVTVWNRTAEKEGARLGRTPAEVVSTCDITFACVSDPKAAKDLVLGPSGVLQGIRPGKCYVDMSTVDADTVTELAQVIVSRGGRFLEAPVSGNQQLSNDGMLVILAAGDRGLYEDCSSCFQAMGKTSFFLGEVGNAAKMMLIVNMVQGSFMATIAEGLTLAQVTGQSQQTLLDILNQGQLASIFLDQKCQNILQGNFKPDFYLKYIQKDLRLAIALGDAVNHPTPMAAAANXVYKRAKALDQSDTICPPCTEPTYTKLSTPRPYPSNPPSDPLFLTWGR

SEQ ID NO: 5732 - protein, 146 aa, Homo sapiens [sequence omitted]

SEQ ID NO: 5733 - protein, 122 aa, Homo sapiens
  SITE (106): Xaa equals any amino acid
MEARPSPPRSHAPDATATAGARSSLGCFSIWICIPSLGRESSGPLVMSQEEWGLGALLSVSVRPQTLHLALTYLGPLPVVPPSPPCPAKSPACPPLSILPPLPLPXVETVFLSVCPFGPDPA

SEQ ID NO: 5734 - protein, 250 aa, Homo sapiens
HEAAVSLRLGDLVWGKLGRYPPWPGKIVNPPKDLKKPRGKKCFFVKFFGTEDHAWIKVEQLKPYHAHKEEMIKINKGKRFQQAVDAVEEFLRRAKGKDQTSSHNSSDDKNRRNSSEERSRPNSGDEKRKLSLSEGKVKKNMGEGKKRVSSGSSERGSKSPLKRAQEQSPRKRGRPPKDEKDLTIPESSTVKGMMAGPMAAFKWQPTASEPVKDADPHFHHFLLSQTEKPAVCYQAITKKLKICEDLLLPR

SEQ ID NO: 5735 - protein, 94 aa, Homo sapiens; identical to SEQ ID NO: 4042

SEQ ID NO: 5736 - protein, 74 aa, Homo sapiens
QREYSKSNIASEVRLQGDYDACLGHPSPALSIAPSDGSQLPCDEVPYGEAHVTRYCKKPLTNSHLETEAQSSSL

SEQ ID NO: 5737 - protein, 46 aa, Homo sapiens; identical to SEQ ID NO: 4043

SEQ ID NO: 5738 - protein, 7 aa, Homo sapiens
LGHLNVL

SEQ ID NO: 5739 - protein, 399 aa, Homo sapiens
LEPPAEPLQYLACYRFHCSHQLGDNMWFLTTLLLWVPVDGQVDTTKAVITLQPPWVSVFQEETVTLHCEVLHLPGSSSTQWFLNGTATQTSTPSYRITSASVNDSGEYRCQRGLSGRSDPIQLEIHRGWLLLQVSSRVFTEGEPLALRCHAWKDKLVYNVLYYRNGKAFKFFHWNSNLTILKTNISHNGTYHCSGMGKHRYTSAGISVTVKELFPAPVLNASVTSPLLEGNLVTLSCETKLLLQRPGLQLYFSFYMGSKTLRGRNTSSEYQILTARREDSGLYWCEAATEDGNVLKRSPELELQVLGLQLPTPVWFHVLFYLAVGIMFLVNTVLWVTIRKELKRKKKWNLEISLDSGHEKKVISSLQEDRHLEEELKCQEQKEEQLQEGVHRKEPQGAT

SEQ ID NO: 5740 - protein, 280 aa, Homo sapiens
MAPSGSLAVPLAVLVLLLWGAPWTHGRRSNVRVITDENWRELLEGDWMIEFYAPWCPACQNLQPEWESFAEWGEDLEVNIAKVDVTEQPGLSGRFIITALPTIYHCKDGEFRRYQGPRTKKDFINFISDKEWKSIEPVSSWFGPGSVLMSSMSALFQLSMWIRTCHNYFIEDLGLPVWGSYTVFALATLFSGLLLGLCMIFVADCLCPSKRRRPQPYPYPSKKLLSESAQPLKKVEEEQEADEEDVSEEEAESKEGTNKDFPQNAIRQRSLGPSLATDKS

SEQ ID NO: 5741 - protein, 267 aa, Homo sapiens
NEWRMVASMSKRRCGVGVSVLDDLLYAVGGHDGSSYLNSVERYDPKTNQWSSDVAPTSTCRTSVGVAVLGGFLYAVGGQDGVSCLNIVERYDPKENKWTRVASMSTRRLGVAVAVLGGFLYAVGGSDGTSPLNTVERYNPQENRWHTIAPMGTRRKHLGCAVYQDMIYAVGGRDDTTELSSAERYNPRTNQWSPVVAMTSRRSGVGLAVVNGQLMAVGGFDGTTYLKTIEVFDPDANTWRLYGGMNYRRLGGGVGVIKMTHCESHIW

SEQ ID NO: 5742 - protein, 9 aa, Homo sapiens
IVPLKSLDV

SEQ ID NO: 5743 - protein, 141 aa, Homo sapiens
  SITE (108): Xaa equals any amino acid
  SITE (113): Xaa equals any amino acid
  SITE (119): Xaa equals any amino acid
  SITE (127): Xaa equals any amino acid
ILDRPQGRATPAQGSGLLVGGRSPTQLQVGEGLLVKPGGHRLDSRGHVLRPRWADHLRSGVQDQRGKRGETPSLLKIQKISRAWWHTPVIPANPGCWARESLEPGRRXLREPXLRHCTXAWETELDXVSKKKKKKKKKKKK

SEQ ID NO: 5744 - protein, 475 aa, Homo sapiens
MSILILTFLLFSLHLEYCGTFCYPNVSQSPYLRTVGEKLLPGIEVLWTGPKVVSKEIPVESIEEVSKIIKRAPVIWDNIHANDYDQKRLFLGPYKGRSTELIPRLKGVLTNPNCEFEANYVAIHTLATWYKSNMNGVRKDVVMTDSEDSTVSIQIKLENEGSDEDIETDVLYSPQMALKLALTEWLQEFGVPHQYSSRQVAHSGAKASVVDGTPLVAAPSLNATTVVTTVYQEPIMSQGAALSGEPTTLTKEEEKKQPDEEPMDMVVEKQEETDHKNDNQILSEIVEAKMAEELKPMDTDKESIAESKSPEMSMQEDCISDIAPMQTDEQTNKEQFVPGPNEKPLYTAEPVTLEDLQLLADLFYLPYEHGPKGAQMLREFQWLRANSSVVSVNCKGKDSEKIEEWRSRAAKFEEMCGLVMGMFTRLSNCANRTILYDMYSYVWDIKSIMSMVKSFVQWLGRCTRNNLFSSNILSL

SEQ ID NO: 5745 - protein, 87 aa, Homo sapiens; identical to SEQ ID NO: 4051

SEQ ID NO: 5746 - protein, 55 aa, Homo sapiens; identical to SEQ ID NO: 4052

SEQ ID NO: 5747 - protein, 28 aa, Homo sapiens
LLPGAGKGPGEREHHLEPSGVDNGKVNT

SEQ ID NO: 5748 - protein, 286 aa, Homo sapiens; identical to SEQ ID NO: 5117
  SITE (253): Xaa equals any amino acid
  SITE (254): Xaa equals any amino acid
  SITE (256): Xaa equals any amino acid

SEQ ID NO: 5749 - protein, 14 aa, Homo sapiens
ALAVPALLLVSVFP

SEQ ID NO: 5750 - protein, 323 aa, Homo sapiens; identical to SEQ ID NO: 4054

SEQ ID NO: 5751 - protein, 107 aa, Homo sapiens; identical to SEQ ID NO: 4056

SEQ ID NO: 5752 - protein, 107 aa, Homo sapiens; identical to SEQ ID NO: 4056

SEQ ID NO: 5753 - protein, 116 aa, Homo sapiens [sequence omitted]

SEQ ID NO: 5754 - protein, 86 aa, Homo sapiens
  SITE (14): Xaa equals any amino acid
  SITE (81): Xaa equals any amino acid
MEMGAAKVWGEVGXWLVIALIQLAKAVLRMLLLLWFKAGLQTSPPIVPLDRETQAQPPDGDHSPGNHEQSYVGKRSNRVVXTLQNT

SEQ ID NO: 5755 - protein, 538 aa, Homo sapiens
  SITE (270): Xaa equals any amino acid
  SITE (271): Xaa equals any amino acid
  SITE (280): Xaa equals any amino acid
  SITE (437): Xaa equals any amino acid
MAPGWAGVGAAVRARLALALALASVLSGPPAVACPTKCTCSAASVDCHGLGLRAVPRGIPRNAERLDLDRNNITRITKMDFAGLKNLRVLHLEDNQVSVIERGAFQDLKQLERLRLNKNKLQVLPELLFQSTPKLTRLDLSENQIQGIPRKAFRGITDVKNLQLDNNHISCIEDGAFRALRDLEILTLNNNNISRILVTSFNHMPKIRTLRLHSNHLYCDCHLAWLSDWLRQRRTVGQFTLCMAPVHLRGFNVADVQKKEYVCPAPHSEXXFCNANSISXPSPCTCSNNIVDCRGKGLMEIPANLPEGIVEIRLEQNSIKAIPAGAFTQYKKLKRIDISKNQISDIAPDAFQGLKSLTSLVLYGNKITEIAKGLFDGLVSLQLLLLNANKINCLRVNTFQDLQNLNLLSLYDNKLQTISKGLFAPLQSIQTLHLAQXPFVCDCHLKWLADYLRTTPSRQAGPAAAARADSPTSASARSRARSSAAQAPRITAAGSAASASWTSCAPRSVAVRARLWTAPTRSWSASQATSLNMSPTCD

SEQ ID NO: 5756 - protein, 29 aa, Homo sapiens
WAAAGGLLLHHDALGPVLALVLVAWAGLQ

SEQ ID NO: 5757 - protein, 63 aa, Homo sapiens; identical to SEQ ID NO: 4062

SEQ ID NO: 5758 - protein, 247 aa, Homo sapiens
MHLARLVGSCSLLLLLGALSGWAASDDPIEKVIEGINRGLSNAEREVGKALDGINSGITHAGREVEKVFNGLSNMGSHTGKELDKGVQGLNHGMDKVAHEINHGIGQAGKEAEKLGHGVNNAAGQAGKEADKAVQGFHTGVHQAGKEAEKLGQGVNHAADQAGKEVEKLGQGAHHAAGQAGKELQNAHNGVNQASKEANQLLNGNHQSGSSSHQGGATTTPLASGASVNTPFINLPALWRSVANIMP

SEQ ID NO: 5759 - protein, 34 aa, Homo sapiens
  SITE (19): Xaa equals any amino acid
VNFELGVIMVIAVSCVKLXSAHNSTQHTSRKHKV

SEQ ID NO: 5760 - protein, 414 aa, Homo sapiens
MNPTLGLAIFLAVLLTVKGLLKPSFSPRNYKALSEVQGWKQRMAAKELARQNMDLGFKLLKKLAFYNPGRNIFLSPLSISTAFSMLCLGAQDSTLDEIKQGFNFRKMPEKDLHEGFHYIIHELTQKTQDLKLSIGNTLFIDQRLQPQRKFLEDAKNFYSAETILTNFQNLEMAQKQINDFISQKTHGKINNLIENIDPGTVMLLANYIFFRARWKHEFDPNVTKEEDFFLEKNSSVKVPMMFRSGIYQVGYDDKLSCTILEIPYQKNITAIFILPDEGKLKHLEKGLQVDTFSRWKTLLSRRVVDVSVPRLHMTGTFDLKKTLSYIGVSKIFEEHGDLTKIAPHRSLKVGEAVHKAELKMDERGTEGAAGTGAQTLPMETPLVVKIDKPYLLLIYSEKIPSVLFLGKIVNPIGK

SEQ ID NO: 5761 - protein, 191 aa, Homo sapiens
  SITE (174): Xaa equals any amino acid
MNPTLGLAIFLAVLLTVKGLLKPSFSPRNYKALSEVQGWKQRMAAKELARQNMDLGFKLLKKLAFYNPGRNIFLSPLSISTAFSMLCLGAQDSTLDEIKQGFNFRKMPEKDLHEGFHYIIHELTQKTQDLKLSIGNTLFIDQRLQPQRKFLEDAKNFYSAETILPTFRIWKWLXSRSMTLSVKKPMGKLTT

SEQ ID NO: 5762 - protein, 414 aa, Homo sapiens; identical to SEQ ID NO: 5760

SEQ ID NO: 5763 - protein, 113 aa, Homo sapiens
MNPTLGLAIFLAVLLTVKGLLKPSFSPRNYKALSEVQGWKQRMAAKELARQNMDLGFKLLKKLAFYNPGRNIFLSPLEHLYSFLHAVPGCPGQHPGRDQAGVQLQKDARKRSS

SEQ ID NO: 5764 - protein, 14 aa, Homo sapiens
LSLPGPLDLYPTPI

SEQ ID NO: 5765 - protein, 70 aa, Homo sapiens
VSSSKTILWLVLSCLCPSSPHPVISGLPQWYIGVLAGIVPVAPIRPGDSGLDLQREGPQPILSQGLNRRT

SEQ ID NO: 5766 - protein, 390 aa, Homo sapiens; identical to SEQ ID NO: 4065

SEQ ID NO: 5767 - protein, 435 aa, Homo sapiens
HASGSRPGCQRLGSRARSGRRAASAPAGPCVPRLAPLTPSRPGRAMISLPGPLVTNLLRFLFLGLSALAPPSRAQLQLHLPANRLQAVEGGEVVLPAWYTLHGEVSSSQPWEVPFVMWFFKQKEKEDQVLSYINGVTTSKPGVSLVYSMPSRNLSLRLEGLQEKDSGPYSCSVNVQNKQGKSRGHSIKTLELNVLVPPAPPSCRLQGVPHVGANVTLSCQSPRSKPAVQYQWDRQLPSFQTFFAPALDVIRGSLSLTNLSSSMAGVYVCKAHNEVGTAQCNVTLEVSTGPGAAVVAGAVVGTLVGLGLLAGLVLLYHRRGKALEEPANDIKEDAIAPRTLPWPKSSDTISKNGTLSSVTSARALRPPHGPPRPGALTPTPSLSSQALPSPRLPTTDGAHPQPISPIPGGVSSSGLSRMGAVPVMVPAQSQAGSLV

SEQ ID NO: 5768 - protein, 390 aa, Homo sapiens
MISLPGPLVTNLLRFLFLGLSALAPPSRAQLQLHLPANRLQAVEGGEVVLPAWYTLHGEVSSSQPWEVPFVMWFFKQKEKEDQVLSYINGVTTSKPGVSLVYSMPSRNLSLRLEGLQEKDSGPYSCSVNVQNKQGKSRGHSIKTLELNVLVPPAPPSCRLQGVPHVGANVTLSCQSPRSKPAVQYQWDRQLPSFQTFFAPALDVIRGSLSLTNLSSSMAGVYVCKAHNEVGTAQCNVTLEVSTGPGAAVVAGAVVGTLVGLGLLAGLVLLYHRRGKALEEPANDIKEDAIAPRTLPWPKSSDTISKNGTLSSVTSARALRPPHGPPRPGALTPTPSLSSQALPSPRLPTTDGAHPQPISPIPGGVSSSGLSRMGAVPVMVPAQSQAGSLV

SEQ ID NO: 5769 - protein, 91 aa, Homo sapiens
IQLFYRGRIWNILLFLLTVQLVGIIKATYACFLRGNAEMIFMSLYSLLYMSSLLPAKIFAIATINKSGWGTSGRKTKKKKKKKKKKKKGGR

SEQ ID NO: 5770 - protein, 63 aa, Homo sapiens
MPVQLTTALRVVGTSLFALAVLGGILAAYVTGYQFIHTEKHYLSFGLYGAILGLHLLFRAFCF

SEQ ID NO: 5771 - protein, 484 aa, Homo sapiens
MPVQLTTALRVVGTSLFALAVLGGILAAYVTGYQFIHTEKHYLSFGLYGAILGLHLLIQSLFAFLEHRRMQRAGQALKLPSPRRGSVALCIAAYQEDPDYLRKCLRSAQRISFPDLKVVMVVDGNRQEDAYMLDIFHEVLGGTEQAGFFVWRSNFHEAGEGETEASLQEGMDRVRDVVRASTFSCIMQKWGGKREVMYTAFKALGDSVDYIQVCDSDTVLDPACTIEMLRVLEEDPQVGGVGGDVQILNKYDSWISFLSSVRYWMAFNVERACQSYFGCVQCISGPLGMYRNSLLQQFLEDWYHQKFLGSKCSFGDDRHLTNRVLSLGYRTKYTARSKCLTETPTKYLRWLNQQTRWSKSYFREWLYNSLWFHKHHLWMTYESVVTGFFPFFLIATVIQLFYRGRIWNILLFLLTVQLVGIIKATYACFLRGNAEMIFMSLYSLLYMSSLLPAKIFAIATINKSGWGTSGRKTKKKKKKKKKKK

SEQ ID NO: 5772 - protein, 167 aa, Homo sapiens; identical to SEQ ID NO: 4067

SEQ ID NO: 5773 - protein, 110 aa, Homo sapiens; identical to SEQ ID NO: 4068

SEQ ID NO: 5774 - protein, 110 aa, Homo sapiens; identical to SEQ ID NO: 4068

SEQ ID NO: 5775 - protein, 99 aa, Homo sapiens
MKIPVLPAVVLLSLLVLHSAQGATLGGPEEESTIENYASRPEAFNTPFLNIDKLRSAFKADEFLNWHALFESIKRKLPFLNWDAFPKLKGLRSATPDAQ

SEQ ID NO: 5776 - protein, 85 aa, Homo sapiens; identical to SEQ ID NO: 4070

SEQ ID NO: 5777 - protein, 6 aa, Homo sapiens
SPRITS

SEQ ID NO: 5778 - protein, 415 aa, Homo sapiens
  SITE (247): Xaa equals any amino acid
  SITE (406): Xaa equals any amino acid
MSPATTGTFLLTAFLLSCADGINGTVNWKTRQANNFIISRKMAAGMKDVYSIFSKVHSDRNVYPSAGVLFVHVLEREYFKGEFPPYPKPGEISNDPITFNTNLMGYPDRPGWLRYIQRTPYSDGVLYGSPTAENVGKPTIIEITAYNRRTFETARHNLIINIMSAEDFPLPYQAEFFIKNMNVEEMLASEVLGDFLGAVKNVWQPERLNAINITSALDRGGRVPLPINDLKEGVYVMVGADVPFSSXLREVENPQNQLRCSQEMEPVITCDKKFRTQFYIDWCKISLVDKTKQVSTYQEVIRGEGILPDGGEYKPPSDSLKSRDYYTDFLITLAVPSAVALVLFLILAYIMCCRREGVIQLVHHSAIQKSTKELRDMSKNREIAWPLSTLPVFHPVTGEIIPPLHXDTMIAQTCH

SEQ ID NO: 5779 - protein, 78 aa, Homo sapiens [sequence omitted]

SEQ ID NO: 5780 - protein, 183 aa, Homo sapiens
MGLFRGFVFLLVLCLLHQSNTSFIKLNNNGFEDIVIVIDPSVPEDEKIIEQIEDMVTTASTYLFEATEKRFFFKNVSILIPENWKENPQYKRPKHENHKHADVIVAPPTLPGRDEPYTKQFTECGEKGEYIHFTPDLLLGKKQNEYGPPGKLFVHEWAHLRWGVFDEYNEDQPFYRAKSKKKK

SEQ ID NO: 5781 - protein, 167 aa, Homo sapiens; identical to SEQ ID NO: 3689

SEQ ID NO: 5782 - protein, 281 aa, Homo sapiens; identical to SEQ ID NO: 4076

SEQ ID NO: 5783 - protein, 110 aa, Homo sapiens
  SITE (82): Xaa equals any amino acid
  SITE (102): Xaa equals any amino acid
  SITE (108): Xaa equals any amino acid
  SITE (110): Xaa equals any amino acid
MYREVCSIRFLFTAVSLLSLFLSAFWLGLLYLVSPLENEPKEMLTLSEYHERVRSQGQQLQQLQAELDKLHKEVSTVRQQQXESAKLRVQKLNEDFCAEARXCFDSGXPX

SEQ ID NO: 5784 - protein, 2 aa, Homo sapiens
EG

SEQ ID NO: 5785 - protein, 37 aa, Homo sapiens
VSGLVCSAITIALRQKSIPHQQGREAVIKTPPPGSLP

SEQ ID NO: 5786 - protein, 205 aa, Homo sapiens; identical to SEQ ID NO: 4078

SEQ ID NO: 5787 - protein, 259 aa, Homo sapiens; identical to SEQ ID NO: 4079

SEQ ID NO: 5788 - protein, 140 aa, Homo sapiens; identical to SEQ ID NO: 4080

SEQ ID NO: 5789 - protein, 140 aa, Homo sapiens
MASPLRSLLFLLAVLAVAWAATPKQGPRMLGAPEEADANEEGVRRALDFAVSEYNKGINDAYHSRAIQVVRARKQLVAGVNYFLDVEMGRTTCTKSQTNLTDCPFHDQPHLMRKALCSFQIYSVPWKGTHSLTKFSCKNA

SEQ ID NO: 5790 - protein, 311 aa, Homo sapiens; identical to SEQ ID NO: 4081

SEQ ID NO: 5791 - protein, 285 aa, Homo sapiens; identical to SEQ ID NO: 4082

SEQ ID NO: 5792 - protein, 285 aa, Homo sapiens; identical to SEQ ID NO: 4082

SEQ ID NO: 5793 - protein, 33 aa, Homo sapiens; identical to SEQ ID NO: 4083

SEQ ID NO: 5794 - protein, 542 aa, Homo sapiens
  SITE (14): Xaa equals any amino acid
EHTGRPGGGGRGRXWGGGGDCIQVKDEEGESGAEEGPDLEEPGAGYKKLFSDAQPLQPLQVYQAPLSLATVPHQALGRTQSSPAAPGGMKSPPDQPVKHLFTTGVVYDTFMLKHQCMCGNTHVHPEHAGRIQSIWSRLQETGLLSKCERIRGRKATLDEIQTVHSEYHTLLYGTSPLNRQKLDSKKLLGPISQKMYAVLPCGGIGVDSDTVWNEMHSSSAVRMAVGCLLELAFKVAAGELKNGFAIIRPPGHHAEESTAMGFCFFNSVAITAKLLQQKLNVGKVLIVDWDIHHGNGTQQAFYNDPSVLYISLHRYDNGNFFPGSGAPEEVGGGPGVGYNVNVAWTGGVDPPIGDVEYLTAFRTVVMPIAHEFSPDVVLVSAGFDAVEGHLSPLGGYSVTARCFGHLTRQLMTLAGGRVVLALEGGHDLTAICDASEACVSALLSVELQPLDEAVLQQKPNINAVATLEKVIEIQSKHWSCVQKFAAGLGRSLREAQAGETEEAETVSAMALLSVGAEQAQAAAAREHSPRPAEEPMEQEPAL

SEQ ID NO: 5795 - protein, 50 aa, Homo sapiens
  SITE (8): Xaa equals any amino acid
  SITE (9): Xaa equals any amino acid
  SITE (21): Xaa equals any amino acid
  SITE (24): Xaa equals any amino acid
  SITE (30): Xaa equals any amino acid
  SITE (43): Xaa equals any amino acid
  SITE (44): Xaa equals any amino acid
INIFFELXXKKKKKKKKKKKXKKXGGGGGXGGGGGGGGGPPTXXRRKYAP

SEQ ID NO: 5796 - protein, 94 aa, Homo sapiens
  SITE (15): Xaa equals any amino acid
  SITE (19): Xaa equals any amino acid
  SITE (20): Xaa equals any amino acid
MGRVLYFHHYFPAMXFSSXXTGILWDTLLRLCAWGLASWPLARGIHVAGILSLLLGTAYSFYLFHPLAYGMVGPLAQDPQSPMAGLRWLDSWDF

SEQ ID NO: 5797 - protein, 134 aa, Homo sapiens; identical to SEQ ID NO: 4085

SEQ ID NO: 5798 - protein, 72 aa, Homo sapiens
KMQMFITTMVLRWEGDNERRDKSKHVHVQGMWFKSLDLKTSSPEKLALPLPSKKDLKSPNPNFRKLVMRCNK

SEQ ID NO: 5799 - protein, 347 aa, Homo sapiens
  SITE (245): Xaa equals any amino acid
  SITE (250): Xaa equals any amino acid
  SITE (253): Xaa equals any amino acid
  SITE (327): Xaa equals any amino acid
  SITE (328): Xaa equals any amino acid
  SITE (332): Xaa equals any amino acid
MLLWSLLVIFDAVTEQADSLTLVAPSSVFEGDSIVLKCQGEQNWKIQKMAYHKDNKELSVFKKFSDFLIQSAVLSDSGNYFCSTKGQLFLWDKTSNIVKIKVQELFQRPVLTASSFQPIEGGPVSLKCETRLSPQRLDVQLQFCFFRENQVLGSGWSSSPELQISAVWSEDTGSYWCKAETVTHRIRKQSLQSQIHVQRIPISNVSLEIRAPGGQVTEGQKLILLCSVAGGTGNVTFSWYREATXTSMGXKTXRSLSAELEIPAVKESDAGKYYCRADNGHVPIQSKVVNIPVRIPVARPVLTLRSSGAQAAVGDLLELHCEGLERXXPNLXPIYHEDVTLWEQLGP

SEQ ID NO: 5800 - protein, 78 aa, Homo sapiens
  SITE (34): Xaa equals any amino acid
FQQDWYQLFFLHLVEFSYESIWSRAFVLVGKFFXTNSTSALDIGLGGVSVSSWFNLGRLCVSRNLAVSSRFSSLCAST

SEQ ID NO: 5801 - protein, 24 aa, Homo sapiens
MAVVSSTVIFAGITLFHSWDLQLC

SEQ ID NO: 5802 - protein, 444 aa, Homo sapiens
VLMLLWSLLVIYDAVTEQADSLTLVAPSSVFEGDSIVLKCQGEQNWKIQKMAYHKDNKELSVFKKFSDFLIQSAVLSDSGNYFCSTKGQLFLWDKTSNIVKIKVQELFQRPVLTASSFQPIEGGPVSLKCETRLSPQRLDVQLQFCFFRENQVLGSGWSSSPELQISAVWSEDTGSYWCKAETVTHRIRKQSLQSQIHVQRIPISNVSLEIRAPGGQVTEGQKLILLCSVAGGTGNVTFSWYREATGTSMGKKTQRSLSAELEIPAVKESDAGKYYCRADNGHVPIQSKVVNIPVRKHSGNYSCEANNGLGAQCSEAVPVSISGPDGYRRDLMTAGVLWGLFGVLGFTGVALLLYALFHKISGESSATNEPRGASRPNPQEFTYSSPTPDMEELQPVYVNVGSVDVDVVYSQVWSMQQPESSANIRTLLENKDSQVIYSSVKKS

SEQ ID NO: 5803 - protein, 239 aa, Homo sapiens
EFQWLALSSPSGLLGPRLQWGTCWSFTVRALRGLPNLVPIYHEDVTLGNSSAPSGGGASFNLSLTAEHSGNYSCEANNGLGAQCSEAVPVSISGPDGYRRDLMTAGVLWGLFGVLGFTGVALLLYALFHKISGESSATNEPRGASRPNPQEFTYSSPTPDMEELQPVYVNVGSVHVDVVYSQVWSMQHARKLSKHQDTSGEQGLPSHLLFCEEIITLGGIRREDQQQGWGIIKTCYKTL

SEQ ID NO: 5804 - protein, 183 aa, Homo sapiens [sequence omitted]

SEQ ID NO: 5805 - protein, 248 aa, Homo sapiens
  SITE (25): Xaa equals any amino acid
  SITE (27): Xaa equals any amino acid
GTSRSWKTTYHAWNINYKKWENEEXRXRRSSHHPHQSQARKAELQPLTLPLPLAPHPGPPLDFRGMLRKLFSSHRFQVIIICLVVLDALLVLAELILDLKIIQPDKNNYAAMVFHYMSITILVFFMMEIIFKLFVFRLEFFHHKFEILDAVVVVVSFILDIVLLFQEHQFEALGLLILLRLWRVARIINGIIISVKTRSERQLLRLKQMNVQLAAKIQHLEFSCSEKEQEIERLNKLLRQHGLLGEVN

SEQ ID NO: 5806 - protein, 183 aa, Homo sapiens [sequence omitted]

SEQ ID NO: 5807 - protein, 230 aa, Homo sapiens
  SITE (83): Xaa equals any amino acid
MPWTILLFAAGSLAIPAPSIRLVPPYPSSQEDPIHIACMAPGNFPGANFTLYRGGQVVQLLQAPTDQRGVTFNLSGGSSKAPXGPFHCQYGVLGELNQSQLSDLSEPVNVSFPVPTWILVLSLSLAGALFLLAGLVAVALVVRKVKLRNLQKKRDRESCWAQINFDSTDMSFDNSLFTVSAKTMPEEDPATLDDHSGTTATPSNSRTRKRPTSTSSSPETPEFSTFRACQ

SEQ ID NO: 5808 - protein, 349 aa, Homo sapiens
EFSMECLYYFLGFLLLAARLPLDAAKRFHDVLGNERPSAYMREHNQLNGWSSDENDWNEKLYPVWKRGDMRWKNSWKGGRVQAVLTSDSPALVGSNITFAVNLIFPRCQKEDANGNIVYEKNCRNEAGLSADPYVYNWTAWSEDSDGENGTGQSHHNVFPDGKPFPHHPGWRRWNFIYVFHTLGQYFQKLGRCSVRVSVNTANVTLGPQLMEVTVYRRHGRAYVPIAQVKDVYVVTDQIPVFVTMFQKNDRNSSDETFLKDLPIMFDVLIHDPSHFLNYSTINYKWSFGDNTGLFVSTNHTVNHTYVLNGTFSLNLTVKAAAPGPCRATATTTQTFKTHPFFSNYSKIL

SEQ ID NO: 5809 - protein, 104 aa, Homo sapiens; identical to SEQ ID NO: 4091

SEQ ID NO: 5810 - protein, 104 aa, Homo sapiens; identical to SEQ ID NO: 4091
